(19) United States
(12) Patent Application Publication
(10) Pub. No.: US 2004/0229257 A1
(43) Pub. Date: Nov. 18, 2004

(54) Methods for the diagnosis and treatment of epilepsy

(76) Inventors: Steven Petrou, Eltham (AU); Samuel Frank Berkovic, Caulfield (AU); Ingrid Eileen Scheffer, Hawthorn East (AU)

Correspondence Address: JENKINS & WILSON, PA, 3100 TOWER BLVD, SUITE 1400, DURHAM, NC, 27707, US

(21) Appl. No.: 10/806,899

(22) Filed: Mar. 23, 2004

(30) Foreign Application Priority Data
Mar. 27, 2003 (AU) 2003901425

(51) Int. Cl. C12Q 1/68; A61K 31/335

(52) U.S. Cl. 435/6

(57) ABSTRACT

A method for the diagnosis of SMEI in a patient comprising:

(1) detecting an alteration in the SCN1A gene, including in a regulatory region of the gene, in a patient sample;

(2) ascertaining whether the alteration is known to be SMEI associated or non-SMEI associated; and

(3) (a) establishing a diagnosis of a high probability of SMEI where the alteration is known to be SMEI associated; or

(b) establishing a diagnosis of a low probability of SMEI where the alteration is non-SMEI associated; or

(e) or, if not known to be either,

(i) considering genetic data for parents and/or relatives;

(ii) establishing whether the alteration has arisen de novo or is inherited; and

(iii) establishing a diagnosis of a low probability of SMEI where the alteration is inherited but a diagnosis of a high probability of SMEI if the alteration is de novo.

### TECHNICAL FIELD

[0001] The present invention relates to the diagnosis and treatment of epilepsy, particularly severe myoclonic epilepsy of infancy (SMEI).

### BACKGROUND ART

[0002] Epilepsies constitute a diverse collection of brain disorders that affect about 3% of the population at some time in their lives (Annegers, 1996). An epileptic seizure can be defined as an episodic change in behaviour caused by the disordered firing of populations of neurons in the central nervous system. This results in varying degrees of involuntary muscle contraction and often a loss of consciousness. Epilepsy syndromes have been classified into more than 40 distinct types based upon characteristic symptoms, types of seizure, cause, age of onset and EEG patterns (Commission on Classification and Terminology of the International League Against Epilepsy, 1989). However the single feature that is common to all syndromes is the persistent increase in neuronal excitability that is both occasionally and unpredictably expressed as a seizure.

[0003] A genetic contribution to the aetiology of epilepsy has been estimated to be present in approximately 40% of affected individuals (Gardiner, 2000). As epileptic seizures may be the end-point of a number of molecular aberrations that ultimately disturb neuronal synchrony, the genetic basis for epilepsy is likely to be heterogeneous. There are over 200 Mendelian diseases which include epilepsy as part of the phenotype. In these diseases, seizures are symptomatic of underlying neurological involvement such as disturbances in brain structure or function. In contrast, there are also a number of “pure” epilepsy syndromes in which epilepsy is the sole manifestation in the affected individuals. These are termed idiopathic and account for over 60% of all epilepsy cases.

[0004] Idiopathic epilepsies have been further divided into partial and generalized sub-types. Partial (focal or local) epileptic fits arise from localized cortical discharges, so that only certain groups of muscles are involved and consciousness may be retained (Sutton, 1990). However, in generalized epilepsy, EEG discharge shows no focus such that all subcortical regions of the brain are involved. Although the observation that generalized epilepsies are frequently inherited is understandable, the mechanism by which genetic defects, presumably expressed constitutively in the brain, give rise to partial seizures is less clear.

[0005] The idiopathic generalized epilepsies (IGE) are the most common group of inherited human epilepsy and do not have simple inheritance. Two broad groups of IGE are now known - the classical idiopathic generalized epilepsies (Commission on Classification and Terminology of the International League Against Epilepsy, 1989) and the newly recognized genetic syndrome of generalized epilepsy with febrile seizures plus (GEFS⁺) (Scheffer and Berkovic, 1997; Singh et al., 1999).

[0006] The classical IGEs are divided into a number of clinically recognizable but overlapping sub-syndromes including childhood absence epilepsy, juvenile absence epilepsy, juvenile myoclonic epilepsy etc (Commission on Classification and Terminology of the International League Against Epilepsy, 1989; Roger et al., 1992). The sub-syndromes are identified by age of onset and the pattern of seizure types (absence, myoclonus and tonic-clonic). Some patients, particularly those with tonic-clonic seizures alone do not fit a specifically recognized sub-syndrome. Arguments for regarding these as separate syndromes, yet recognizing that they are part of a neurobiological continuum, have been presented previously (Berkovic et al., 1987; 1994; Reutens and Berkovic, 1995).

[0007] GEFS⁺ was originally recognized through large multi-generation families and comprises a variety of sub-syndromes. Febrile seizures plus (FS⁺) is a sub-syndrome where children have febrile seizures occurring outside the age range of 3 months to 6 years, or have associated febrile tonic-clonic seizures. Many family members have a phenotype indistinguishable from the classical febrile convulsion syndrome and some have FS⁺ with additional absence, myoclonic, atonic, or complex partial seizures. The severe end of the GEFS⁺spectrum includes myoclonic-astatic epilepsy.

[0008] In GEFS⁺ families, linkage analysis on rare multi-generation large families with clinical evidence of a major autosomal dominant gene have demonstrated loci on chromosomes 19q and 2q. Both the 19q and 2q GEFS⁺ loci have been confirmed in independently ascertained large families, and genetic defects have been identified. Families linked to 19q are known and a mutation in the gene for the β1 subunit of the neuronal sodium channel (SCN1B) has been identified (Wallace et al., 1998). This mutation results in the loss of a critical disulphide bridge of this regulatory subunit and causes a loss of function in vitro. Families linked to 2q are also known and mutations in the pore-forming α subunit of the neuronal sodium channel (SCN1A) have been identified (PCT/AU01/01648; Escayg et al., 2000).

[0009] Severe myoclonic epilepsy of infancy (SMEI) is classed as an epileptic syndrome that manifests as both generalised and focal (partial) seizures (Commission on Classification and Terminology of the International League Against Epilepsy, 1989). SMEI begins with prolonged febrile and afebrile hemiclonic and generalised seizures in the first year of life. Between one and four years, other seizure types evolve including myoclonic, absence and atonic seizures. Neurological development is normal in infancy with progressive slowing after two years. A family history of epilepsy and/or febrile seizures is often found in SMEI patients and recent work has shown that family members have epilepsy phenotypes consistent with the GEFS+ spectrum (Singh et al., 2001; Veggiotti, 2001). From a clinical perspective, as GEFS+ and SMEI involve fever-related seizures, it was thought that sodium channel genes may be the target for mutations in SMEI affected individuals. This fact was later confirmed when mutations in the SCN1A gene in SMEI patients were identified (Claes et al., 2001; Ohmori et al., 2002). Of interest is that each of these mutations were de novo, a fact difficult to reconcile based on the clinical experience that a significant number of SMEI cases have a family history of GEFS+.

[0010] The development of a molecular diagnostic test to aid in the early diagnosis of SMEI is important. Such a test would direct the correct treatment strategy for patients likely to be affected with SMEI and would predict a risk for seizure aggravation as a result of factors such as fever induced by vaccination or other causes. Clinical studies to determine the molecular basis of SMEI have been variable in their results and have been inconclusive as to a single molecular basis for SMEI, particularly as alterations in the SCN1A gene are involved in other epilepsy subtypes. The inventors have recognised the need for such a predictive diagnostic test for SMEI and have therefore established a method that overcomes the limitations identified in previous clinical studies and determines the likelihood that an epilepsy patient has SMEI based on a molecular analysis of the SCN1A gene.

### DISCLOSURE OF THE INVENTION

[0011] In a first aspect of the present invention there is provided a method for the diagnosis of SMEI in a patient comprising:

[0012] (1) detecting an alteration in the SCN1A gene, including in a regulatory region of the gene, in a patient sample;

[0013] (2) ascertaining whether the alteration is known to be SMEI associated or non-SMEI associated; and

[0014] (3) (a) establishing a diagnosis of a high probability of SMEI where the alteration is known to be SMEI associated; or

[0015] (b) establishing a diagnosis of a low probability of SMEI where the alteration is non-SMEI associated; or

[0016] (c) or, if not known to be either,

[0017] (i) considering genetic data for parents and/or relatives;

[0018] (ii) establishing whether the alteration has arisen de novo or is inherited; and

[0019] (iii) establishing a diagnosis of a low probability of SMEI where the alteration is inherited but a diagnosis of a high probability of SMEI if the alteration is de novo.

[0020] In an embodiment the invention further comprises establishing whether the alteration would result in a major disruption to the protein and, if de novo, establishing a diagnosis of a very high probability of SMEI.

[0021] This information is important for initiating the correct treatment regimen for a patient. Current antiepileptic drug (AED) treatments may aggravate seizures in some patients with epilepsy. This may take the form of increased seizure frequency, increased seizure severity, or the appearance of a new seizure type. With respect to SMEI, it is known that carbamazepine, gabapentin, lamotrigine and vigabatrin may aggravate seizures (Bourgeois, 2003) whereas valproate has shown to be of benefit to SMEI patients (Scheffer and Berkovic, 2003). The diagnostic method of the present invention therefore will provide important information towards directing the appropriate primary AED selection in patients suspected of having SMEI.

[0022] The nature of the alterations in the SCN1A gene may encompass all forms of gene mutations including deletions, insertions, rearrangements and point mutations in the coding and non-coding regions such as the promoter, introns or untranslated regions. Deletions may be of the entire gene or only a portion of the gene whereas point mutations may result in stop codons, frameshifts or amino acid substitutions. Point mutations occurring in the regulatory regions of SCN1A, such as in the promoter, may lead to loss or a decrease of expression of the mRNA or may abolish proper mRNA processing leading to a decrease in mRNA stability or translation efficiency.

[0023] The identification of SCN1A alterations in a patient that lead to more severe changes to the SCN1A protein (such as frameshift mutations and nonsense mutations leading to a truncated protein) increases the likelihood that the patient has SMEI. This likelihood is increased even further if it can be shown that the alteration is a de novo change rather than one that is inherited from the patients parents or relatives, or that the alteration in the SCN1A gene is one that has previously been associated with SMEI. The flow chart in FIG. 1 illustrates one aspect of the present invention.

[0024] In an embodiment there is provided a method for the diagnosis of SMEI in a patient comprising performing one or more assays to test for the existence of an SCN1A alteration and to identify the nature of the alteration.

[0025] In a further embodiment there is provided a method for the diagnosis of SMEI in a patient comprising the steps of:

[0026] (1) performing one or more assays to test for the existence of an alteration in the SCN1A gene of the patient; and, if the results indicate the existence of an alteration in the SCN1A gene,

[0027] (2) performing one or more assays to identify the nature of the SCN1A alteration.

[0028] There exists a number of assay systems that can be used to test for the existence of an SCN1A alteration and the invention is not limited by the examples that are provided below.

[0029] In one embodiment an assay system employed may be the analysis of SCN1A DNA from a patient sample in comparison to wild-type SCN1A DNA. Genomic DNA may be used for the diagnostic analysis and may be obtained from a number of sources including, but not limited to, body cells, such as those present in the blood or cheek, tissue biopsy, surgical specimen, or autopsy material. The DNA may be isolated and used directly for the diagnostic assays or may be amplified by the polymerase chain reaction (PCR) prior to analysis. Similarly, RNA or cDNA may also be used, with or without PCR amplification. In addition, prenatal diagnosis can be accomplished by testing fetal cells, placental cells or amniotic fluid.

[0030] In a specific embodiment, a DNA hybridisation assay may be employed. These may consist of probe-based assays specific for the SCN1A gene. One such assay may look at a series of Southern blots of DNA that has been digested with one or more restriction enzymes. Each blot may contain a series of normal individuals and a series of patient samples. Samples displaying hybridisation fragments that differ in length from normal DNA when probed with sequences near or including the SCN1A gene (SCN1A gene probe) indicate a possible SCN1A alteration. If restriction enzymes that produce very large restriction fragments are used then pulsed field gel electropheresis (PFGE) may be employed.

[0031] SCN1A exon specific hybridisation assays may also be employed. This type of probe-based assay will utilize at least one probe which specifically and selectively hybridises to an exon of the SCN1A gene in its wild-type form. Thus, the lack of formation of a duplex nucleic acid hybrid containing the nucleic acid probe is indicative of the presence of an alteration in the SCN1A gene. Because of the high specificity of probe-based tests, any negative result is highly indicative of the presence of an SCN1A alteration however further investigational assays should be employed to identify the nature of the alteration to determine the likelihood it is an SMEI-associated alteration.

[0032] The SCN1A exon specific assay approach could also be adapted to identify previously determined SCN1A alterations responsible for SMEI. In this aspect, a probe which specifically and selectively hybridises with the SCN1A gene in its altered form is used (allele specific probe). In this case the formation of a duplex nucleic acid hybrid containing the nucleic acid probe is indicative of the presence of the alteration in the SCN1A gene. In each variation of the exon specific assay approach, it is important to take into account known polymorphisms in the SCN1A gene that are not associated with SMEI. A secondary assay such as DNA sequencing should subsequently be employed to ensure that any suspected alterations are not known polymorphisms.

[0033] The SCN1A exon specific probes used for each of the abovementioned assays may be derived from: (1) PCR amplification of each exon of the SCN1A gene using intron specific primers flanking each exon; (2) cDNA probes specific for each exon; or (3) a series of oligonucleotides that collectively represent an SCN1A exon.

[0034] In a further embodiment, an assay to analyse heteroduplex formation may be employed. By mixing denatured wild-type SCN1A DNA with a DNA sample from a patient, any sequence variations in the SCN1A sequence between the two samples will lead to the formation of a mixed population of heteroduplexes and homoduplexes during reannealing of the DNA. Analysis of this mixed population can be achieved through the use of such techniques as high performance liquid chromatography (HPLC) which are performed under partially denaturing temperatures. In this manner, heteroduplexes will elute from the HPLC column earlier than the homoduplexes because of their reduced melting temperature.

[0035] In a further embodiment, patient samples may be subject to electrophoretic-based assays. For example electrophoretic assays that determine SCN1A fragment length differences may be employed. Fragments of each patient's genomic DNA are amplified with SCN1A gene intron specific primers. The amplified regions of the SCN1A gene therefore include the exon of interest, the splice site junction at the exon/intron boundaries, and a short portion of intron at either end of the amplification product. The amplification products may be run on an electrophoresis size-separation gel and the lengths of the amplified fragments are compared to known and expected standard lengths from the wild-type gene to determine if an insertion or deletion mutation is found in the patient sample. This procedure can advantageously be used in a “multiplexed” format, in which primers for a plurality of exons (generally from 2 to 8) are co-amplified, and evaluated simultaneously on a single electrophoretic gel. This is made possible by careful selection of the primers for each exon. The amplified fragments spanning each exon are designed to be of different sizes and therefore distinguishable on an electrophoresis/size separation gel. The use of this technique has the advantage of detecting both normal and mutant alleles in heterozygous individuals. Furthermore, through the use of multiplexing it can be very cost effective.

[0036] In a further approach, diagnostic electrophoretic assays for the detection of previously identified SCN1A alterations responsible for SMEI may utilise PCR primers which bind specifically to altered exons of the SCN1A gene. In this case, product will only be observed in the electrophoresis gel if hybridization of the primer occurred. Thus, the appearance of amplification product is an indicator of the presence of the alteration, while the length of the amplification product may indicate the presence of additional alterations.

[0037] Additional electrophoretic assays may be employed. These may include the single-stranded conformational polymorphism (SSCP) procedure (Orita et al., 1989). As mentioned above, fragments of each patient's genomic DNA are PCR amplified with SCN1A gene intron specific primers such that individual exons of the SCN1A gene are amplified and may be analysed individually. Exon-specific PCR products are then subjected to electrophoresis on non-denaturing polyacrylamide gels such that DNA fragments migrate through the gel based on their conformation as dictated by their sequence composition. SCN1A exon-specific fragments that vary in sequence from wild-type SCN1A sequence will have a different secondary structure conformation and therefore migrate differently through the gel. Aberrantly migrating PCR products in patient samples are indicative of an alteration in the SCN1A exon and should be analysed further in secondary assays such as DNA sequencing to identify the nature of the alteration.

[0038] Additional electrophoretic assays that may be employed include RNase protection assays (Finkelstein et al., 1990; Kinszler et al., 1991) and denaturing gradient gel electrophoresis (DGGE)(Wartell et al., 1990; Sheffield et al., 1989). RNase protection involves cleavage of a mutant polynucleotide into two or more smaller fragments whereas DGGE detects differences in migration rates of mutant sequences compared to wild-type sequences, using a denaturing gradient gel.

[0039] In the RNase protection assay a labelled riboprobe which is complementary to the human wild-type SCN1A gene coding sequence is hybridised with either mRNA or DNA isolated from the patient and subsequently digested with the enzyme RNase A which is able to detect some mismatches in a duplex RNA structure. If a mismatch is detected by RNase A, it cleaves at the site of the mismatch. Thus, when the annealed RNA preparation is separated on an electrophoretic gel matrix, if a mismatch has been detected and cleaved by RNase A, an RNA product will be seen which is smaller than the full length duplex RNA for the riboprobe and the mRNA or DNA. The riboprobe need not be the full length of the SCN1A mRNA or gene but can be a segment of either. If the riboprobe comprises only a segment of the SCN1A mRNA or gene, it will be desirable to use a number of these probes to screen the whole mRNA sequence for mismatches.

[0040] In a further embodiment, enzymatic based assays (Taylor and Deeble, 1999) may be used in diagnostic applications. Such assays include the use of S1 nuclease, ribonuclease, T4 endonuclease VII, MutS (Modrich, 1991), Cleavase and MutY. In the MutS assay, the protein binds only to sequences that contain a nucleotide mismatch in a heteroduplex between mutant and wild-type sequences.

[0041] When an assay is to be based upon the SCN1A protein, a variety of approaches are possible. For example, diagnosis can be achieved by monitoring differences in the electrophoretic mobility of normal SCN1A protein and SCN1A protein isolated from a patient sample. Such an approach will be particularly useful in identifying alterations in which charge substitutions are present, or in which insertions, deletions or substitutions have resulted in a significant change in the electrophoretic migration of the resultant protein. Alternatively, diagnosis may be based upon differences in the proteolytic cleavage patterns of normal and altered proteins, differences in molar ratios of the various amino acid residues, or by functional assays demonstrating altered function of the gene products.

[0042] Further assays that are based on the SCN1A protein include immunoassays. Immunoassays for the SCN1A gene product are not currently known. However, immunoassay is included in the selection of assays because the procedures for raising antibodies against specific gene products are well described in the literature, for example in U.S. Pat. Nos. 4,172,124 and 4,474,893 which are incorporated herein by reference. Antibodies are normally raised which bind to portions of the gene product away from common mutation sites such that the same antibody binds to both mutant and normal protein. Preferred antibodies for use in this invention are monoclonal antibodies because of their improved predictability and specificity. It will be appreciated, however, that essentially any antibody which possesses the desired high level of specificity can be used, and that optimization to achieve high sensitivity is not required.

[0043] For the diagnostic detection of novel alterations in SCN1A involved in SMEI, antibodies raised to the carboxy-terminal end of the protein would be preferable. For the diagnostic detection of SCN1A alterations previously identified to be involved in SMEI, antibody raised against the defective gene product is preferable. Antibodies are added to a portion of the patient sample under conditions where an immunological reaction can occur, and the sample is then evaluated to see if such a reaction has occurred. The specific method for carrying out this evaluation is not critical and may include enzyme-linked immunosorbant assays (ELISA), described in U.S. Pat. No. 4,016,043, which is incorporated herein by reference; fluorescent enzyme immunoassay (FEIA or ELFA), which is similar to ELISA, except that a fluoregenic enzyme substrate such as 4-methylumbelliferyl-beta-galactoside is used instead of a chromogenic substrate, and radioimmunoassay (RIA).

[0044] The most definitive diagnostic assay that may be employed is DNA sequencing, and ultimately may be the only assay that is needed to be performed. Comparison of the SCN1A DNA wild-type sequence with the SCN1A sequence of a test patient provides both high specificity and high sensitivity. The general methodology employed involves amplifying (for example with PCR) the DNA fragments of interest from patient DNA; combining the amplified DNA with a sequencing primer which may be the same as or different from the amplification primers; extending the sequencing primer in the presence of normal nucleotide (A, C, G, and T) and a chain-terminating nucleotide, such as a dideoxynucleotide, which prevents further extension of the primer once incorporated; and analyzing the product for the length of the extended fragments obtained. While such methods, which are based on the original dideoxysequencing method disclosed by Sanger et al., 1977 are useful in the present invention, the final assay is not limited to such methods. For example, other methods for determining the sequence of the gene of interest, or a portion thereof, may also be employed. Alternative methods include those described by Maxam and Gilbert (1977) and variations of the dideoxy method and methods which do not rely on chain-terminating nucleotides at all such as that disclosed in U.S. Pat. No. 4,971,903, which is incorporated herein by reference. Any sequence differences (other than benign polymorphisms) in SCN1A exons of a test patient when compared to that of the wild-type SCN1A sequence indicate a potential SMEI-causing alteration.

[0045] In a further aspect of the invention there is provided a method for the diagnosis of SMEI in a patient comprising the steps of selecting a system of assays comprising one or more assays to provide a test for the existence of an SCN1A alteration, and one or more assays to provide a test to identify the nature of the alteration, so as to determine the likelihood that it is an SMEI-associated alteration.

[0046] Application of the invention has lead to the identification of a number of mutations in the SCN1A gene in individuals that have been clinically diagnosed with SMEI. This demonstrates the utility of the diagnostic assay in providing a likelihood that an individual may be affected with SMEI.

[0047] According to a further aspect of the present invention there is provided an isolated nucleic acid molecule encoding an altered SCN1A subunit of a mammalian voltage-gated sodium channel, wherein the alteration gives rise to an SMEI phenotype and has the sequence set forth in one of SEQ ID NOS: 1-25.

[0048] In a further aspect of the present invention there is provided an isolated polypeptide, said polypeptide being an altered SCN1A subunit of a mammalian voltage-gated sodium channel, wherein the polypeptide has the amino acid sequence set forth in one of SEQ ID NOS: 26-48 and the alteration gives rise to an SMEI phenotype.

[0049] Additional alterations in the SCN1A gene were identified during this study. These alterations were identified in individuals that were not suspected of being affected with SMEI based on a clinical diagnosis.

[0050] Accordingly, in a further aspect of the present invention there is provided an isolated nucleic acid molecule encoding an altered SCN1A subunit of a mammalian voltage-gated sodium channel, wherein the alteration gives rise to a non-SMEI epilepsy phenotype and has the sequence set forth in one of SEQ ID NOS: 49-53.

[0051] In a still further aspect of the present invention there is provided an isolated polypeptide, said polypeptide being an altered SCN1A subunit of a mammalian voltage-gated sodium channel, wherein the polypeptide has the amino acid sequence set forth in one of SEQ ID NOS: 54-58 and the alteration gives rise to a non-SMEI epilepsy phenotype.

[0052] In another aspect of the present invention there is provided an isolated nucleic acid molecule comprising the nucleotide sequence set forth in any one of SEQ ID NO: 1-25, 49-53.

[0053] In another aspect of the present invention there is provided an isolated nucleic acid molecule consisting of the nucleotide sequence set forth in any one of SEQ ID NO: 1-25, 49-53.

[0054] The nucleotide sequences of the present invention can be engineered using methods accepted in the art for a variety of purposes. These include, but are not limited to, modification of the cloning, processing, and/or expression of the gene product. PCR reassembly of gene fragments and the use of synthetic oligonucleotides allow the engineering of the nucleotide sequences of the present invention. For example, oligonucleotide-mediated site-directed mutagenesis can introduce further mutations that create new restriction sites, alter expression patterns and produce splice variants etc.

[0055] As a result of the degeneracy of the genetic code, a number of polynucleotide sequences, some that may have minimal similarity to the polynucleotide sequences of any known and naturally occurring gene, may be produced. Thus, the invention includes each and every possible variation of a polynucleotide sequence that could be made by selecting combinations based on possible codon choices. These combinations are made in accordance with the standard triplet genetic code as applied to the polynucleotide sequences of the present invention, and all such variations are to be considered as being specifically disclosed.

[0056] The nucleic acid molecules of this invention are typically DNA molecules, and include cDNA, genomic DNA, synthetic forms, and mixed polymers, both sense and antisense strands, and may be chemically or biochemically modified, or may contain non-natural or derivatised nucleotide bases as will be appreciated by those skilled in the art. Such modifications include labels, methylation, intercalators, alkylators and modified linkages. In some instances it may be advantageous to produce nucleotide sequences possessing a substantially different codon usage than that of the polynucleotide sequences of the present invention. For example, codons may be selected to increase the rate of expression of the peptide in a particular prokaryotic or eukaryotic host corresponding with the frequency that particular codons are utilized by the host. Other reasons to alter the nucleotide sequence without altering the encoded amino acid sequences include the production of RNA transcripts having more desirable properties, such as a greater half-life, than transcripts produced from the naturally occurring mutated sequence.

[0057] The invention also encompasses production of nucleic acid sequences of the present invention entirely by synthetic chemistry. Synthetic sequences may be inserted into expression vectors and cell systems that contain the necessary elements for transcriptional and translational control of the inserted coding sequence in a suitable host. These elements may include regulatory sequences, promoters, 5′ and 3′ untranslated regions and specific initiation signals (such as an ATG initiation codon and Kozak consensus sequence) which allow more efficient translation of sequences encoding the polypeptides of the present invention. In cases where the complete coding sequence, including the initiation codon and upstream regulatory sequences, are inserted into the appropriate expression vector, additional control signals may not be needed. However, in cases where only coding sequence, or a fragment thereof, is inserted, exogenous translational control signals as described above should be provided by the vector. Such signals may be of various origins, both natural and synthetic. The efficiency of expression may be enhanced by the inclusion of enhancers appropriate for the particular host cell system used (Scharf et al., 1994).

[0058] The invention also includes nucleic acid molecules that are the complements of the sequences described herein.

[0059] The present invention allows for the preparation of purified polypeptide or protein from the polynucleotides of the present invention, or variants thereof. In order to do this, host cells may be transformed with a novel nucleic acid molecule as described above. Typically said host cells are transfected with an expression vector comprising a DNA molecule according to the invention. A variety of expression vector/host systems may be utilized to contain and express sequences encoding polypeptides of the invention. These include, but are not limited to, microorganisms such as bacteria transformed with plasmid or cosmid DNA expression vectors; yeast transformed with yeast expression vectors; insect cell systems infected with viral expression vectors (e.g., baculovirus); or mouse or other animal or human tissue cell systems. Mammalian cells can also be used to express a protein using a vaccinia virus expression system. The invention is not limited by the host cell or vector employed.

[0060] The polynucleotide sequences, or variants thereof, of the present invention can be stably expressed in cell lines to allow long term production of recombinant proteins in mammalian systems. Sequences encoding the polypeptides of the present invention can be transformed into cell lines using expression vectors which may contain viral origins of replication and/or endogenous expression elements and a selectable marker gene on the same or on a separate vector. The selectable marker confers resistance to a selective agent, and its presence allows growth and recovery of cells which successfully express the introduced sequences. Resistant clones of stably transformed cells may be propagated using tissue culture techniques appropriate to the cell type.

[0061] The protein produced by a transformed cell may be secreted or retained intracellularly depending on the sequence and/or the vector used. As will be understood by those of skill in the art, expression vectors containing polynucleotides which encode a protein may be designed to contain signal sequences which direct secretion of the protein through a prokaryotic or eukaryotic cell membrane.

[0062] In addition, a host cell strain may be chosen for its ability to modulate expression of the inserted sequences or to process the expressed protein in the desired fashion. Such modifications of the polypeptide include, but are not limited to, acetylation, glycosylation, phosphorylation, and acylation. Post-translational cleavage of a “prepro” form of the protein may also be used to specify protein targeting, folding, and/or activity. Different host cells having specific cellular machinery and characteristic mechanisms for post-translational activities (e.g., CHO or HeLa cells), are available from the American Type Culture Collection (ATCC) and may be chosen to ensure the correct modification and processing of the foreign protein.

[0063] When large quantities of the protein product of the gene are needed, such as for antibody production, vectors which direct high levels of expression of this protein may be used, such as those containing the T5 or T7 inducible bacteriophage promoter. The present invention also includes the use of the expression systems described above in generating and isolating fusion proteins which contain important functional domains of the protein. These fusion proteins are used for binding, structural and functional studies as well as for the generation of appropriate antibodies.

[0064] In order to express and purify the protein as a fusion protein, the appropriate cDNA sequence is inserted into a vector which contains a nucleotide sequence encoding another peptide (for example, glutathionine succinyl transferase). The fusion protein is expressed and recovered from prokaryotic or eukaryotic cells. The fusion protein can then be purified by affinity chromatography based upon the fusion vector sequence. The desired protein is then obtained by enzymatic cleavage of the fusion protein.

[0065] Fragments of the polypeptides of the present invention may also be produced by direct peptide synthesis using solid-phase techniques. Automated synthesis may be achieved by using the ABI 431A Peptide Synthesizer (Perkin-Elmer). Various fragments of this protein may be synthesized separately and then combined to produce the full-length molecule.

[0066] In another aspect of the present invention there is provided an isolated polypeptide comprising the amino acid sequence set forth in any one of SEQ ID Numbers: 26-48, 54-58.

[0067] In another aspect of the present invention there is provided an isolated polypeptide consisting of the amino acid sequence set forth in any one of SEQ ID NO: 26-48, 54-58.

[0068] According to still another aspect of the invention, there is provided a mammalian voltage-gated sodium channel that incorporates an altered SCN1A protein as described above.

[0069] According to still another aspect of the present invention there is provided an expression vector comprising a nucleic acid molecule as described above.

[0070] According to still another aspect of the present invention there is provided a cell comprising a nucleic acid molecule as described above.

[0071] According to still another aspect of the present invention there is provided a method of preparing a polypeptide, said polypeptide being an altered SCN1A protein of a mammalian voltage-gated sodium channel, comprising the steps of:

[0072] (1) culturing a cell as described above under conditions effective for polypeptide production; and

[0073] (2) harvesting the polypeptide.

[0074] The mutant SCN1A protein may be allowed to assemble with other subunits of the sodium channel that are co-expressed by the cell (such as the SCN1B protein), whereby the assembled altered sodium channel is harvested.

[0075] According to still another aspect of the invention there is provided a polypeptide which is the product of the process described above.

[0076] Substantially purified protein or fragments thereof can then be used in further biochemical analyses to establish secondary and tertiary structure. Such methodology is known in the art and includes, but is not restricted to, X-ray crystallography of crystals of the proteins or of the assembled ion channel incorporating the proteins or by nuclear magnetic resonance (NMR). Determination of structure allows for the rational design of pharmaceuticals to interact with the altered sodium channel as a whole or through interaction with the altered SCN1A protein of the channel (see drug screening below), alter the overall sodium channel protein charge configuration or charge interaction with other proteins, or to alter its function in the cell.

[0077] It will be appreciated that having identified novel alterations in the SCN1A gene responsible for epilepsy, including SMEI, the altered SCN1A proteins will enable therapeutic methods for the treatment of epilepsy, including SMEI.

[0078] Therapeutic Applications

[0079] According to still another aspect of the invention there is provided a method of treating epilepsy, including SMEI, comprising administering a selective antagonist, agonist or modulator of an SCN1A polypeptide as described above to a subject in need of such treatment.

[0080] In still another aspect of the invention there is provided the use of a selective antagonist, agonist or modulator of an SCN1A polypeptide as described above in the manufacture of a medicament for the treatment of epilepsy, including SMEI.

[0081] In one aspect, a suitable antagonist, agonist or modulator will restore wild-type function to sodium channels containing SCN1A alterations that form part of this invention, or will negate the effects the altered receptor has on cell function.

[0082] Using methods well known in the art, an altered sodium channel, or SCN1A protein of the channel, that is causative of epilepsy, including SMEI, may be used to produce antibodies specific for the altered channel or SCN1A protein of the channel or to screen libraries of pharmaceutical agents to identify those that bind the altered channel or SCN1A protein of the channel.

[0083] In one aspect, an antibody, which specifically binds to an altered sodium channel or altered SCN1A protein of the invention, may be used directly as an agonist, antagonist or modulator, or indirectly as a targeting or delivery mechanism for bringing a pharmaceutical agent to cells or tissues that express the altered channel.

[0084] In a still further aspect of the invention there is provided an antibody which is immunologically reactive with a polypeptide as described above, but not with a wild-type SCN1A channel or SCN1A protein thereof.

[0085] In particular, there is provided an antibody to an assembled sodium channel containing an alteration in the SCN1A protein that forms part of the channel, which is causative of epilepsy, including SMEI. Such antibodies may include, but are not limited to, polyclonal, monoclonal, chimeric, and single chain antibodies as would be understood by the person skilled in the art.

[0086] For the production of antibodies, various hosts including rabbits, rats, goats, mice, humans, and others may be immunized by injection with a polypeptide as described above or with any fragment or oligopeptide thereof which has immunogenic properties. Various adjuvants may be used to increase immunological response and include, but are not limited to, Freund's, mineral gels such as aluminium hydroxide, and surface-active substances such as lysolecithin. Adjuvants used in humans include BCG (bacilli Calmette-Guerin) and Corynebacterium parvum.

[0087] It is preferred that the oligopeptides, peptides, or fragments used to induce antibodies to the altered sodium channel, or altered SCN1A protein thereof, have an amino acid sequence consisting of at least 5 amino acids, and, more preferably, of at least 10 amino acids. It is also preferable that these oligopeptides, peptides, or fragments are identical to a portion of the amino acid sequence of the natural protein and contain the entire amino acid sequence of a small, naturally occurring molecule. Short stretches of SCN1A amino acids may be fused with those of another protein, such as KLH, and antibodies to the chimeric molecule may be produced.

[0088] Monoclonal antibodies to an altered sodium channel, or altered SCN1A protein thereof, may be prepared using any technique which provides for the production of antibody molecules by continuous cell lines in culture. These include, but are not limited to, the hybridoma technique, the human B-cell hybridoma technique, and the EBV-hybridoma technique. (For example, see Kohler et al., 1975; Kozbor et al., 1985; Cote et al., 1983; Cole et al., 1984).

[0089] Monoclonal antibodies produced may include, but are not limited to, mouse-derived antibodies, humanised antibodies and fully human antibodies.

[0090] Antibodies may also be produced by inducing in vivo production in the lymphocyte population or by screening immunoglobulin libraries or panels of highly specific binding reagents as disclosed in the literature. (For example, see Orlandi et al., 1989; Winter and Milstein, 1991).

[0091] Antibody fragments which contain specific binding sites for an altered sodium channel, or altered SCN1A protein thereof, may also be generated. For example, such fragments include, F(ab′)2 fragments produced by pepsin digestion of the antibody molecule and Fab fragments generated by reducing the disulfide bridges of the F(ab′)2 fragments. Alternatively, Fab expression libraries may be constructed to allow rapid and easy identification of monoclonal Fab fragments with the desired specificity. (For example, see Huse et al., 1989).

[0092] Various immunoassays may be used for screening to identify antibodies having the desired specificity. Numerous protocols for competitive binding or immunoradiometric assays using either polyclonal or monoclonal antibodies with established specificities are well known in the art. Such immunoassays typically involve the measurement of complex formation between an ion channel and its specific antibody. A two-site, monoclonal-based immunoassay utilizing antibodies reactive to two non-interfering sodium channel epitopes is preferred, but a competitive binding assay may also be employed.

[0093] In a further aspect of the invention there is provided a method of treating epilepsy, including SMEI comprising administering an isolated nucleic acid molecule which is the complement (antisense) of any one of the nucleic acid molecules described above and which encodes an RNA molecule that hybridizes with the mRNA encoding an altered SCN1A of the invention, to a subject in need of such treatment.

[0094] In a still further aspect of the invention there is provided the use of an isolated nucleic acid molecule which is the complement (antisense) of a nucleic acid molecule of the invention and which encodes an RNA molecule that hybridizes with the mRNA encoding an altered SCN1A of the invention, in the manufacture of a medicament for the treatment of epilepsy, including SMEI.

[0095] Typically, a vector expressing the complement (antisense) of the polynucleotides of the invention may be administered to a subject in need of such treatment. Many methods for introducing vectors into cells or tissues are available and equally suitable for use in vivo, in vitro, and ex vivo. For ex vivo therapy, vectors may be introduced into stem cells taken from the patient and clonally propagated for autologous transplant back into that same patient. Delivery by transfection, by liposome injections, or by polycationic amino polymers may be achieved using methods which are well known in the art. (For example, see Goldman et al., 1997).

[0096] Additional antisense or gene-targeted silencing strategies may include, but are not limited to, the use of antisense oligonucleotides, injection of antisense RNA, transfection of antisense RNA expression vectors, and the use of RNA interference (RNAi) or short interfering RNAs (siRNA). Still further, catalytic nucleic acid molecules such as DNAzymes and ribozymes may be used for gene silencing (Breaker and Joyce, 1994; Haseloff and Gerlach, 1988). These molecules function by cleaving their target mRNA molecule rather than merely binding to it as in traditional antisense approaches.

[0097] In a further aspect, a suitable agonist, antagonist or modulator may include peptides, phosphopeptides or small organic or inorganic compounds that can restore wild-type activity of sodium channels containing alterations in SCN1A protein of the receptor as described above.

[0098] Peptides, phosphopeptides or small organic or inorganic compounds suitable for therapeutic applications may be identified using nucleic acids and peptides of the invention in drug screening applications as described below. Molecules identified from these screens may also be of therapeutic application in affected individuals carrying other sodium channel alterations, or individuals carrying alterations in genes other than those comprising the sodium channel, if the molecule is able to correct the common underlying functional deficit imposed by these alterations and those of the invention.

[0099] There is therefore provided a method of treating epilepsy, including SMEI comprising administering a compound that is a suitable agonist, antagonist or modulator of a sodium channel and that has been identified using altered SCN1A of the invention.

[0100] In some instances, an appropriate approach for treatment may be combination therapy. This may involve the administering an antibody, an agonist, antagonist or modulator, or complement (antisense) to an altered sodium channel, or altered SCN1A protein thereof, of the invention to inhibit its functional effect, combined with administration of wild-type SCN1A which may restore levels of wild-type sodium channel formation to normal levels. Wild-type SCN1A can be administered using gene therapy approaches as described above for complement administration.

[0101] There is therefore provided a method of treating epilepsy, including SMEI comprising administration of an antibody, an agonist, antagonist or modulator, or complement to an altered sodium channel, or altered SCN1A protein thereof, of the invention in combination with administration of wild-type SCN1A.

[0102] In still another aspect of the invention there is provided the use of an antibody, an agonist, antagonist or modulator, or complement to an altered sodium channel, or altered SCN1A protein thereof, of the invention in combination with the use of wild-type SCN1A, in the manufacture of a medicament for the treatment of epilepsy, including SMEI.

[0103] In further embodiments, any of the agonists, antagonists, modulators, antibodies, complementary sequences or vectors of the invention may be administered alone or in combination with other appropriate therapeutic agents. Selection of the appropriate agents may be made by those skilled in the art, according to conventional pharmaceutical principles. The combination of therapeutic agents may act synergistically to effect the treatment or prevention of the various disorders described above. Using this approach, therapeutic efficacy with lower dosages of each agent may be possible, thus reducing the potential for adverse side effects.

[0104] Any of the therapeutic methods described above may be applied to any subject in need of such therapy, including, for example, mammals such as dogs, cats, cows, horses, rabbits, monkeys, and most preferably, humans.

[0105] Drug Screening

[0106] According to still another aspect of the invention, nucleic acid molecules of the invention as well as peptides of the invention, particularly purified altered SCN1A protein and cells expressing these, are useful for the screening of candidate pharmaceutical compounds for the treatment of epilepsy, including SMEI.

[0107] Still further, it provides the use of an altered sodium channel polypeptide complex for the screening of candidate pharmaceutical compounds.

[0108] Still further, it provides the use wherein high throughput screening techniques are employed.

[0109] Compounds that can be screened in accordance with the invention include, but are not limited to peptides (such as soluble peptides), phosphopeptides and small organic or inorganic molecules (such as natural product or synthetic chemical libraries and peptidomimetics).

[0110] In one embodiment, a screening assay may include a cell-based assay utilising eukaryotic or prokaryotic host cells that are stably transformed with recombinant molecules expressing the polypeptides or fragments of the invention, in competitive binding assays. Binding assays will measure the formation of complexes between an altered sodium channel, or altered SCN1A protein thereof, and the compound being tested, or will measure the degree to which a compound being tested will inhibit or restore the formation of a complex between an altered sodium channel, or altered SCN1A protein thereof, and its interactor or ligand.

[0111] The invention is particularly useful for screening compounds by using the polypeptides of the invention in transformed cells, transfected or injected oocytes, or animal models bearing altered SCN1A such as transgenic animals or gene targeted (knock-in) animals (see transformed hosts). Drug candidates can be added to cultured cells that express an altered SCN1A protein (appropriate wild-type sodium channel subunits such as SCN1B should also be expressed for receptor assembly), can be added to oocytes transfected or injected with an altered SCN1A protein (appropriate wild-type sodium channel subunits such as SCN1B must also be injected for receptor assembly), or can be administered to an animal model expressing an altered SCN1A protein. Determining the ability of the test compound to modulate altered sodium channel activity can be accomplished by a number of techniques known in the art. These include for example measuring the effect on the current of the channel as compared to the current of a cell or animal containing the wild-type sodium channel.

[0112] Current in cells can be measured by a number of approaches including the patch-clamp technique (methods described in Hamill et al, 1981) or using fluorescence based assays as are known in the art (see Gonzalez et al., 1999). Drug candidates that alter the current to a more normal level are useful for treating or preventing epilepsy, including SMEI.

[0113] Non cell-based assays may also be used for identifying compounds that can inhibit or restore binding between the altered sodium channel, or altered SCN1A protein thereof, of the invention, and their interactors. Such assays are known in the art and include for example AlphaScreen technology (PerkinElmer Life Sciences, Mass., USA). This application relies on the use of beads such that each interaction partner is bound to a separate bead via an antibody. Interaction of each partner will bring the beads into proximity, such that laser excitation initiates a number of chemical reactions ultimately leading to fluorophores emitting a light signal. Candidate compounds that inhibit the binding of the altered sodium channel, or altered SCN1A protein thereof, with its interactor will result in loss of light emission, while candidate compounds that restore the binding of the altered sodium channel, or altered SCN1A protein thereof, with its interactor will result in positive light emission. These assays ultimately enable identification and isolation of the candidate compounds.

[0114] High-throughput drug screening techniques may also employ methods as described in WO84/03564. Small peptide test compounds synthesised on a solid substrate can be assayed for altered SCN1A protein or altered sodium channel binding. Bound altered sodium channel or altered SCN1A polypeptide is then detected by methods well known in the art. In a variation of this technique, purified polypeptides of the invention can be coated directly onto plates to identify interacting test compounds.

[0115] The invention also contemplates the use of competition drug screening assays in which neutralizing antibodies capable of specifically binding the altered sodium channel compete with a test compound for binding thereto. In this manner, the antibodies can be used to detect the presence of any peptide that shares one or more antigenic determinants of the altered receptor.

[0116] The polypeptides of the present invention may also be used for screening compounds developed as a result of combinatorial library technology. This provides a way to test a large number of different substances for their ability to modulate activity of a polypeptide. A substance identified as a modulator of polypeptide function may be peptide or non-peptide in nature. Non-peptide “small molecules” are often preferred for many in vivo pharmaceutical applications. In addition, a mimic or mimetic of the substance may be designed for pharmaceutical use. The design of mimetics based on a known pharmaceutically active compound (“lead” compound) is a common approach to the development of novel pharmaceuticals. This is often desirable where the original active compound is difficult or expensive to synthesise or where it provides an unsuitable method of administration. In the design of a mimetic, particular parts of the original active compound that are important in determining the target property are identified. These parts or residues constituting the active region of the compound are known as its pharmacophore. Once found, the pharmacophore structure is modelled according to its physical properties using data from a range of sources including x-ray diffraction data and NMR. A template molecule is then selected onto which chemical groups which mimic the pharmacophore can be added. The selection can be made such that the mimetic is easy to synthesise, is likely to be pharmacologically acceptable, does not degrade in vivo and retains the biological activity of the lead compound. Further optimisation or modification can be carried out to select one or more final mimetics useful for in vivo or clinical testing.

[0117] It is also possible to isolate a target-specific antibody and then solve its crystal structure. In principle, this approach yields a pharmacophore upon which subsequent drug design can be based as described above. It may be possible to avoid protein crystallography altogether by generating anti-idiotypic antibodies (anti-ids) to a functional, pharmacologically active antibody. As a mirror image of a mirror image, the binding site of the anti-ids would be expected to be an analogue of the original receptor. The anti-id could then be used to isolate peptides from chemically or biologically produced peptide banks.

[0118] Another alternative method for drug screening relies on structure-based rational drug design. Determination of the three dimensional structure of the polypeptides of the invention, or the three dimensional structure of the GABA-B receptors which incorporate these polypeptides allows for structure-based drug design to identify biologically active lead compounds.

[0119] Three dimensional structural models can be generated by a number of applications, some of which include experimental models such as x-ray crystallography and NMR and/or from in silico studies of structural databases such as the Protein Databank (PDB). In addition, three dimensional structural models can be determined using a number of known protein structure prediction techniques based on the primary sequences of the polypeptides (e.g. SYBYL—Tripos Associated, St. Louis, Mo.), de novo protein structure design programs (e.g. MODELER—MSI Inc., San Diego, Calif., or MOE—Chemical Computing Group, Montreal, Canada) or ab initio methods as described, for example, in U.S. Pat. Nos. 5,331,573 and 5,579,250, the contents of which are incorporated herein by reference.

[0120] Once the three dimensional structure of a polypeptide or polypeptide complex has been determined, structure-based drug discovery techniques can be employed to design biologically-active compounds based on these three dimensional structures. Such techniques are known in the art and include examples such as DOCK (University of California, San Francisco) or AUTODOCK (Scripps Research Institute, La Jolla, Calif.). A computational docking protocol will identify the active site or sites that are deemed important for protein activity based on a predicted protein model. Molecular databases, such as the Available Chemicals Directory (ACD) are then screened for molecules that complement the protein model.

[0121] Using methods such as these, potential clinical drug candidates can be identified and computationally ranked in order to reduce the time and expense associated with typical ‘wet lab’ drug screening methodologies.

[0122] Compounds identified through screening procedures as described above, and which are based on the use of the altered nucleic acid and polypeptides of the invention, can also be tested for their effect on correcting the functional deficit imposed by other gene alterations in affected individuals including other SCN1A alterations.

[0123] Such compounds form a part of the present invention, as do pharmaceutical compositions containing these and a pharmaceutically acceptable carrier.

[0124] Pharmaceutical Preparations

[0125] Compounds identified from screening assays and shown to restore sodium channel wild-type activity can be administered to a patient at a therapeutically effective dose to treat or ameliorate epilepsy, including SMEI, as described above. A therapeutically effective dose refers to that amount of the compound sufficient to result in amelioration of symptoms of the disorder.

[0126] Toxicity and therapeutic efficacy of such compounds can be determined by standard pharmaceutical procedures in cell cultures or experimental animals. The data obtained from these studies can then be used in the formulation of a range of dosages for use in humans.

[0127] Pharmaceutical compositions for use in accordance with the present invention can be formulated in a conventional manner using one or more physiological acceptable carriers, excipients or stabilisers which are well known. Acceptable carriers, excipients or stabilizers are non-toxic at the dosages and concentrations employed, and include buffers such as phosphate, citrate, and other organic acids; antioxidants including absorbic acid; low molecular weight (less than about 10 residues) polypeptides; proteins, such as serum albumin, gelatin, or immunoglobulins; binding agents including hydrophilic polymers such as polyvinylpyrrolidone; amino acids such as glycine, glutamine, asparagine, arginine or lysine; monosaccharides, disaccharides, and other carbohydrates including glucose, mannose, or dextrins; chelating agents such as EDTA; sugar alcohols such as mannitol or sorbitol; salt-forming counterions such as sodium; and/or non-ionic surfactants such as Tween, Pluronics or polyethylene glycol (PEG).

[0128] The formulation of pharmaceutical compositions for use in accordance with the present invention will be based on the proposed route of administration. Routes of administration may include, but are not limited to, inhalation, insufflation (either through the mouth or nose), oral, buccal, rectal or parental administration.

[0129] Microarray

[0130] In further embodiments, complete cDNAs, oligonucleotides or longer fragments derived from any of the SCN1A polynucleotide sequences described herein may be used as probes in a microarray. The microarray can be used to diagnose epilepsy, including SMEI, through the identification of the SCN1A alterations of the invention, to understand the genetic basis of epilepsy, or can be used to develop and monitor the activities of therapeutic agents.

[0131] According to a further aspect of the present invention, tissue material obtained from animal models (see below) generated as a result of the identification of specific SCN1A human alterations of the present invention, can be used in microarray experiments. These experiments can be conducted to identify the level of expression of SCN1A, or the level of expression of any cDNA clone from whole-tissue libraries, in diseased tissue as opposed to normal control tissue. Variations in the expression level of genes, including SCN1A, between the two tissues indicates their possible involvement in the disease process either as a cause or consequence of the original SCN1A alteration present in the animal model. These experiments may also be used to determine gene function, to understand the genetic basis of epilepsy, to diagnose epilepsy, and to develop and monitor the activities of therapeutic agents. Microarrays may be prepared, used, and analyzed using methods known in the art. (For example, see Schena et al., 1996; Heller et al., 1997).

[0132] Transformed Hosts

[0133] The present invention also provides for genetically modified (knock-out, knock-in and transgenic), non-human animal models comprising nucleic acid molecules of the invention. These animals are useful for the study of the function of a sodium channel, to study the mechanisms of epilepsy as related to a sodium channel, for the screening of candidate pharmaceutical compounds, for the creation of explanted mammalian cell cultures which express altered sodium channels, and for the evaluation of potential therapeutic interventions.

[0134] Animal species which are suitable for use in the animal models of the present invention include, but are not limited to, rats, mice, hamsters, guinea pigs, rabbits, dogs, cats, goats, sheep, pigs, and non-human primates such as monkeys and chimpanzees. For initial studies, genetically modified mice and rats are highly desirable due to the relative ease in generating knock-in, knock-out or transgenics of these animals, their ease of maintenance and their shorter life spans. For certain studies, transgenic yeast or invertebrates may be suitable and preferred because they allow for rapid screening and provide for much easier handling. For longer term studies, non-human primates may be desired due to their similarity with humans.

[0135] To create an animal model for an altered sodium channel of the invention, several methods can be employed. These include, but are not limited to, generation of a specific alteration in a homologous animal gene, insertion of a wild type human gene and/or a humanized animal gene by homologous recombination, insertion of an altered human gene as genomic or minigene cDNA constructs using wild type or altered or artificial promoter elements, or insertion of artificially modified fragments of the endogenous gene by homologous recombination. The modifications include insertion of mutant stop codons, the deletion of DNA sequences, or the inclusion of recombination elements (lox p sites) recognized by enzymes such as Cre recombinase.

[0136] To create transgenic mice in order to study gain of gene function in vivo, a SCN1A alteration of the invention can be inserted into a mouse germ line using standard techniques such as oocyte microinjection. Gain of gene function can mean the over-expression of a gene and its protein product, or the genetic complementation of a mutation of the gene under investigation. For oocyte injection, one or more copies of the mutant gene can be inserted into the pronucleus of a just-fertilized mouse oocyte. This oocyte is then reimplanted into a pseudo-pregnant foster mother. The live-born mice can then be screened for integrants using analysis of tail DNA for the presence of the relevant human SCN1A gene sequence. The transgene can be either a complete genomic sequence injected as a YAC, BAC, PAC or other chromosome DNA fragment, a cDNA with either the natural promoter or a heterologous promoter, or a minigene containing all of the coding region and other elements found to be necessary for optimum expression.

[0137] To generate knock-out mice or knock-in mice, gene targeting through homologous recombination in mouse embryonic stem (ES) cells may be applied. Knock-out mice are generated to study loss of gene function in vivo while knock-in mice (which are preferred) allow the study of gain of function or to study the effect of specific gene mutations. Knock-in mice are similar to transgenic mice however the integration site and copy number are defined in the former.

[0138] For knock-out mouse generation, gene targeting vectors can be designed such that they delete (knock-out) the protein coding sequence of the SCN1A gene in the mouse genome. In contrast, knock-in mice can be produced whereby a gene targeting vector containing the relevant altered SCN1A gene can integrate into a defined genetic locus in the mouse genome. For both applications, homologous recombination is catalysed by specific DNA repair enzymes that recognise homologous DNA sequences and exchange them via double crossover.

[0139] Gene targeting vectors are usually introduced into ES cells using electroporation. ES cell integrants are then isolated via an antibiotic resistance gene present on the targeting vector and are subsequently genotyped to identify those ES cell clones in which the gene under investigation has integrated into the locus of interest. The appropriate ES cells are then transmitted through the germline to produce a novel mouse strain.

[0140] In instances where gene ablation results in early embryonic lethality, conditional gene targeting may be employed. This allows genes to be deleted in a temporally and spatially controlled fashion. As above, appropriate ES cells are transmitted through the germline to produce a novel mouse strain, however the actual deletion of the gene is performed in the adult mouse in a tissue specific or time controlled manner. Conditional gene targeting is most commonly achieved by use of the cre/lox system. The enzyme cre is able to recognise the 34 base pair loxP sequence such that loxP flanked (or floxed) DNA is recognised and excised by cre. Tissue specific cre expression in transgenic mice enables the generation of tissue specific knock-out mice by mating gene targeted floxed mice with cre transgenic mice. Knock-out can be conducted in every tissue (Schwenk et al., 1995) using the ‘deleter’ mouse or using transgenic mice with an inducible cre gene (such as those with tetracycline inducible cre genes), or knock-out can be tissue specific for example through the use of the CD19-cre mouse (Rickert et al., 1997).

[0141] According to still another aspect of the invention there is provided the use of genetically modified non-human animals as described above for the screening of candidate pharmaceutical compounds (see drug screening above). These animals are also useful for the evaluation (eg therapeutic efficacy, toxicity, metabolism) of candidate pharmaceutical compounds, including those identified from the invention as described above, for the treatment of epilepsy, including SMEI.

[0142] Throughout this specification and the claims, the words “comprise”, “comprises” and “comprising” are used in a non-exclusive sense, except where the context requires otherwise.

[0143] It will be apparent to the person skilled in the art that while the invention has been described in some detail for the purposes of clarity and understanding, various modifications and alterations to the embodiments and methods described herein may be made without departing from the scope of the inventive concept disclosed in this specification.

[0144] Modes for Performing the Invention

[0145] Any combination of assay systems described above may be employed for the identification of SCN1A mutations potentially causative of SMEI. Provided below are examples of assays that may be employed.

### EXAMPLE 1

### Patient DNA Collection

[0146] The flowchart in FIG. 1 illustrates a strategy based on the invention that can be used to determine the likelihood that an alteration in the SCN1A gene is responsible for SMEI. The assay combination chosen is preceded by selecting the patient population to be examined and obtaining DNA from the sample population. The sample population may encompass any individual with epilepsy but would likely focus on children with febrile seizures as well as other patients that are suspected to have myoclonic epilepsy. For the present study, the patient population chosen included individuals that had been diagnosed with SMEI from a clinical analysis or had severe encephalopathies occurring during the first 12 months of life.

[0147] DNA from a test patient may be obtained in a number of ways. The most common approach is to obtain DNA from blood samples taken from the patient, however DNA may also be obtained using less invasive approaches such as from cheek cell swabs.

[0148] For the current study DNA was extracted from collected blood using the QIAamp DNA Blood Maxi kit (Qiagen) according to manufacturers specifications or through procedures adapted from Wyman and White (1980). For DNA samples obtained using the QIAamp kit, a final ethanol precipitation step was employed with DNA pellets being resuspended in sterile water. Stock DNA samples were kept at a concentration of 200 ng/ul and 100 ng/ul dilutions were prepared for subsequent PCR reactions.

### EXAMPLE 2

### dHPLC Assay

[0149] Once DNA was obtained from the patients, PCR amplification of individual exons of the SCN1A gene was employed prior to analysis by high performance liquid chromatography (dHPLC). The SCN1A gene has 26 exons for which primers were designed to amplify 33 amplicons. Each exon was amplified by a single amplicon except for exons 11, 15 and 16 which are amplified in two amplicons respectively and exon 26 where 5 amplicons were used to amplify the entire exon. Table 1 provides a list of primers that were designed to analyse each exon of the SCN1A gene.

[0150] PCR amplification reactions were performed in a volume of 20 ul and were prepared in 96-well plates. For the majority of amplicons the PCR reaction consisted of 1× PCR buffer (Invitrogen), 200 uM dNTPs, 300 ng of each primer, 1.5 mM MgCl₂, 100 ng DNA and 0.5 units of Taq DNA polymerase (Invitrogen). The above conditions were used for all amplicons except for exon 5, and 26(1) where 1 Unit of Taq DNA polymerase was used.

[0151] The thermal cycling conditions employed for PCR amplification varied according to each exon. For exons 1-4, 6-9, 11(1), 11(2), 12, 14, 15(1), 15(2), 16(2), 19, and 22-24, PCR reactions were performed using 1 cycle of 94° C. for 2 minutes, followed by 10 cycles of 60° C. for 30 seconds, 72° C. for 30 seconds, and 94° C. for 30 seconds, followed by 25 cycles of 55° C. for 30 seconds, 72° C. for 30 seconds, and 94° C. for 30 seconds. A final annealing reaction at 55° C. for 30 seconds followed by an extension reaction for 10 minutes at 72° C. completed the cycling conditions for these amplicons.

[0152] For exon 5, the same conditions were employed as above except the annealing temperature was 62° C. for 10 cycles and then 58° C. for 25 cycles.

[0153] For exons 10, 16(1), 21, 25, 26(1), 26(2), 26(3), 26(4), and 26(5), PCR reactions were performed using 1 cycle of 94° C. for 2 minutes, followed by 10 cycles of 60° C. for 1.5 minutes, 72° C. for 1.5 minutes, and 94° C. for 1.5 minutes, followed by 25 cycles of 55° C. for 1.5 minutes, 72° C. for 1.5 minutes, and 94° C. for 1.5 minutes. A final annealing reaction at 55° C. for 1.5 minutes followed by an extension reaction for 10 minutes at 72° C. completed the cycling conditions for these amplicons.

[0154] For exons 17, 18 and 20, PCR reactions were performed using 1 cycle of 94° C. for 2 minutes, followed by 35 cycles of 50° C. for 30 seconds, 72° C. for 30 seconds, and 94° C. for 30 seconds. A final annealing reaction at 50° C. for 30 seconds followed by an extension reaction for 10 minutes at 72° C. completed the cycling conditions for these amplicons.

[0155] For exon 13, PCR reactions were performed using 1 cycle of 94° C. for 2 minutes, followed by 10 cycles of 94° C. for 1 minute, 64° C. for 1.5 minutes, and 72° C. for 1.5 minutes, followed by 25 cycles of 94° C. for 1 minute, 60° C. for 1.5 minutes, and 72° C. for 1.5 minutes. This was followed by a final extension reaction for 10 minutes at 72° C. to complete the cycling conditions for this amplicon.

[0156] Prior to dHPLC analysis, PCR products were heated to 95° C. for 5 minutes and are then slowly cooled at −3° C. increments for 1.5 minutes (until 25° C. is reached). This is to allow the formation of hetero- and homoduplexes depending upon the nucleotide constitution of the PCR product.

[0157] Various dHPLC systems can be used for heteroduplex analysis and mutation detection. This study used the Transgenomic WAVE® System and the methodology supplied with the system. In order to detect mutations on the dHPLC each product needed to be run under partially denaturing conditions. Due to each amplicon of the SCN1A gene having a different sequence, the temperature(s) at which each product is partially denatured needed to be calculated. Using the Transgenomic software supplied with the dHPLC system the required temperatures for each of the amplicons was determined and is shown in Table 2.

[0158] Amplicons are fed through the dHPLC column according to manufacturers conditions and computer generated chromatograms are compared between patient samples and wild-type samples. The analysis is done by visually looking at the chromatograms and also using the mutation detection Transgenomic software supplied with the HPLC. Those patient samples showing different peak patterns to wild-type are considered to contain alterations in the SCN1A amplicon under investigation and the DNA from those individuals was subject to a further assay, namely DNA sequencing (see example 3 below), to determine the nature of the SCN1A alteration and to predict the likelihood that the alteration was responsible for SMEI.

### EXAMPLE 3

### DNA Sequencing Assay

[0159] PCR products from the dHPLC analysis that showed different peak patterns to wild-type may be subject to secondary assays such as DNA sequencing to identify the nature of the alteration. In the present study DNA sequencing was employed. This first involved re-amplification of the amplicon displaying an altered dHPLC chromatogram from the relevant individual followed by purification of the PCR amplified templates for sequencing using QiaQuick PCR preps (Qiagen) based on manufacturers procedures. The primers used to sequence the purified amplicons were identical to those used for the initial amplification step. For each sequencing reaction, 25 ng of primer and 100 ng of purified PCR template were used. The BigDye sequencing kit (ABI) was used for all sequencing reactions according to the manufacturers specifications. The products were run on an ABI 377 Sequencer and analysed using the EditView program.

[0160] A comparison of the DNA sequence obtained from the patient sample was then made directly to that of the wild-type SCN1A sequence in order to identify the nature of the DNA alteration that lead to the change detected by dHPLC.

[0161] The results of the screening of 26 of the 33 amplicons of the SCN1A gene are shown in Table 3. A total of 96 patients were analysed with their clinical epilepsy phenotype being hidden during the analysis. A total of 34 samples were shown to have an alteration in the SCN1A gene and of these, 28 samples had a clear SMEI phenotype based on a clinical analysis. Four of the SCN1A alterations (M1780T, R222X, R1407X, R1892X) that were identified are not shown in Table 3 as they had previously been associated with SMEI (Nabbout et al., 2003; Claes et al., 2001; Sugawara et al., 2002). It can therefore be determined that if an SCN1A alteration is found in a patient, then the patient has an 82% chance (28/34) of having SMEI.

[0162] This likelihood would increase if the alteration identified was one that had previously been associated with SMEI. In addition, based on current opinion (Mulley et al., 2003) the likelihood would further increase if the alteration is not seen in the parents or relatives of the affected individual (i.e. is a de novo alteration) and is still further increased if the alteration is found to result in a major disruption to the protein (such as a truncating alteration). The ability to provide this level of certainty as to a diagnosis of SMEI will be of benefit when considering therapy regimes for the patient and the avoidance of seizure aggravation induced by such factors as fever associated with vaccinations and other causes.

### EXAMPLE 4

### Additional Assays—SSCP Assay

[0163] In addition to the assays described above, other assays may be employed to test for the existence of alterations in the SCN1A gene that are associated with SMEI. One such assay is single strand conformation polymorphism (SSCP) analysis. In this technique, DNA obtained from the patient is first PCR amplified for individual exons of the SCN1A gene. The primers employed for dHPLC analysis (see Table 1) may also be used for SSCP analysis.

[0164] In some instances the primers used for SSCP analysis are labelled at their 5′ end with HEX for a fluorescent-based detection approach as used for example in the GelScan 2000 system (Corbett Research, Australia). SSCP PCR reactions and cycling conditions can be performed as described above for dHPLC analysis, however any PCR reaction and cycling conditions may be employed provided that the amplification produces a distinct product specific for the amplicon under investigation only.

[0165] An example of alternative PCR reaction conditions are where the reaction is performed in a total volume of 10 μl containing 67 mM Tris-HCl (pH 8.8); 16.5 mM (NH₄)₂SO₄; 6.5 μM EDTA; 1.5 mM MgCl₂; 200 μM each dNTP; 10% DMSO; 0.17 mg/ml BSA; 10 mM β-mercaptoethanol; 5 μg/ml each primer and 100 U/ml Taq DNA polymerase. PCR cycling conditions may use 10 cycles of 94° C. for 30 seconds, 60° C. for 30 seconds, and 72° C. for 30 seconds followed by 25 cycles of 94° C. for 30 seconds, 55° C. for 30 seconds, and 72° C. for 30 seconds. A final extension reaction for 10 minutes at 72° C. should follow.

[0166] Twenty μl of loading dye comprising 50% (v/v) formamide, 12.5 mM EDTA and 0.02% (w/v) bromophenol blue is then added to completed reactions which are subsequently run on non-denaturing 4% polyacrylamide gels with a cross-linking ratio of 35:1 (acrylamide:bis-acrylamide) and containing 2% glycerol. For analysis of PCR amplicons using the GelScan 2000 system, the gel thickness typically employed is 100 μm, with a width of 168 mm and length of 160 mm. Gels are normally run at 1200 volts and approximately 20 mA, at 22° C. and analysed on the GelScan 2000 system according to manufacturers specifications. Those amplicons that contain alterations in the SCN1A sequence will migrate through the gel differently than wild-type amplicons due to their altered single strand conformation. A further assay such as DNA sequencing may then be employed (see example 3 above) to determine the nature of the SCN1A alteration in the amplicon.

TABLE 1
Primer Sequences Used for dHPLC Assay Analysis of SCN1A

| | | | Size |
|---|---|---|---|
| Exon | Forward Primer | Reverse Primer | (bp) |
| 1 | CCTCTAGCTCATGTTTCATGAC | TGCAGTAGGCAATTAGCAGC | 448 |
| 2 | CTAATTAAGAAGAGATCCAGTGACAG | GCTATAAAGTGCTTACAGATCATGTAC | 356 |
| 3 | CCCTGAATTTTGGCTAAGCTGCAG | CTACATTAAGACACAGTTTCAAAATCC | 263 |
| 4 | GGGCTACGTTTCATTTGTATG | GCAACCTATTCTTAAAGCATAAGACTG | 358 |
| 5 | AGGCTCTTTGTACCTACAGC | CATGTAGGGTCCGTCTCATT | 200 |
| 6 | CACACGTGTTAAGTCTTCATAGT | AGCCCCTCAAGTATTTATCCT | 394 |
| 7 | GAACCTGACCTTCCTGTTCTC | GTTGGCTGTTATCTTCAGTTTC | 241 |
| 8 | AAAGGCAGCAGAACGACTTG | GGATAGAGGAACTCAAGTCTC | 322 |
| 9 | TTGAAAGTTGAAGCCACCAC | CCACCTGCTCTTAGGTACTC | 363 |
| 10 | GCCATGCAAATACTTCAGCCC CACAACAGTGGTTGATTCAGTTG | 480 | |
| 11(1) | TGAATGCTGAAATCTCCTTCTAC | CTCAGGTTGCTGTTGCGTCTC | 306 |
| 11(2) | GATAACGAGAGCCGTAGAGAT | TCTGTAGAAACACTGGCTGG | 315 |
| 12 | CATGAAATTCACTGTGTCACC | CAGCTCTTGAATTAGACTGTC | 347 |
| 13 | ATCCTTGGGAGGTTTAGAGT | GCATGAAGGATGGTTGAAAG | 510 |
| 14 | CATTGTGGGAAAATAGCATAAGC | GCTATGCAGAACCCTGATTG | 339 |
| 15(1) | TGAGACGGTTAGGGCAGATC | AGAAGTCATTCATGTGCCAGC | 348 |
| 15(2) | GTCTTGGCCATCATCGTCTTC | ACATGTGCACAATGTGCAGG | 350 |
| 16(1) | GTGGTGTTTCCTTCTCATCAAG | CACTGCTGCCAGTTCCTATAC | 458 |
| 16(2) | CAACAGTCCTTCATTAGGAAAC | ACCTTCCCACACCTATAGAATC | 353 |
| 17 | CTTGGCAGGCAACTTATTACC | CAAGCTGCACTCCAAATGAAAG | 232 |
| 18 | TGGAAGCAGAGACACTTTATCTAC | GTGCTGTATCACCTTTTCTTAATC | 234 |
| 19 | CCTATTCCAATGAAATGTCATATG | CAAGCTACCTTGAACAGAGAC | 318 |
| 20 | CTACACATTGAATGATGATTCTGT | GCTATATACAATACTTCAGGTTCT | 216 |
| 21 | ACCAGAGATTACTAGGGGAAT | CTGGGCTCATAAACTTGTACTAAC | 513 |
| 22 | ACTGTCTTGGTCCAAAATCTG | TTCGATTAATTTTACCACCTGATC | 267 |
| 23 | AGCACCAGTGACATTTCCAAC | GGCAGAGAAAACACTCCAAGG | 271 |
| 24 | GACACAGTTTTAACCAGTTTG | TGTGAGACAAGCATGCAAGTT | 207 |
| 25 | CAGGGCCAATGACTACTTTGC | CTGATTGCTGGGATGATCTTGAATC | 477 |
| 26(1) | CAGGACTCTGAACCTTACCTTG | ATTCCAACAGATGGGTTCCCA | 534 |
| 26(2) | TCCTGCGTTGTTTAACATCGG | AGCGCAGCTGCAAACTGAGAT | 504 |
| 26(3) | TGGAAGCTCAGTTAAGGGAGA | GTAGTGATTGGCTGATAGGAG | 480 |
| 26(4) | CCGATGCAACTCAGTTCATGGA | TGCCTTCTTGCTCATGTTTTTCCACA | 555 |
| 26(5) | AGAGCGATTCATGGCTTCCAATCC | TGGTGACAAGGGGTCACTGTCT | 526 |

Note:
Primer sequences are listed 5′ to 3′. Due to the large size of exons 11, 15, 16, and 26, the exons were split into two or more overlapping amplicons.

[0167] TABLE 2
Partial Denaturing Conditions for dHPLC Assay Analysis of SCN1A
Amplicons

| Exon | Temp 1 | Temp 2 | Temp 3 |
|---|---|---|---|
| 1 | 53.0 | 55.2 | 58.8 |
| 2 | 53.5 | 55.2 | 58.0 |
| 3 | 55.9 | — | — |
| 4 | 54.5 | 55.5 | 56.5 |
| 5 | 60.2 | — | — |
| 6 | 53.8 | 57.5 | 58.9 |
| 7 | 56.3 | — | — |
| 8 | 57.9 | — | — |
| 9 | 56.7 | 60.1 | — |
| 10 | 56.0 | 58.5 | 61.0 |
| 11(1) | 57.1 | 60.2 | 61.5 |
| 11(2) | 58.8 | 61.2 | 62.3 |
| 12 | 55.3 | 57.3 | — |
| 13 | 53.8 | 55.2 | 56.4 |
| 14 | 55.4 | 57.9 | — |
| 15(1) | 57.5 | 60.2 | — |
| 15(2) | 58.4 | 60.7 | — |
| 16(1) | 54.9 | 55.6 | 57.3 |
| 16(2) | 56.1 | — | — |
| 17 | 57.6 | 60.4 | — |
| 18 | 58.5 | — | — |
| 19 | 53.0 | 56.5 | — |
| 20 | 58.5 | — | — |
| 21 | 55.2 | 56.7 | — |
| 22 | 55.5 | — | — |
| 23 | 55.6 | 56.3 | — |
| 24 | 55.6 | 56.7 | — |
| 25 | 53.8 | 55.6 | 56.8 |
| 26(1) | 55.8 | 59.0 | 60.0 |
| 26(2) | 58.5 | — | — |
| 26(3) | 58.5 | 59.8 | — |
| 26(4) | 55.5 | 57.0 | 57.9 |
| 26(5) | 55.1 | 56.6 | — |

Note: All temperatures are in degrees celcius. Temp 1, Temp 2, and Temp 3 represent the temperatures at which different regions of the amplicon denature during the dHPLC analysis. Some amplicons required 3 partially denaturing temperatures for complete analysis of the amplicon whereas other amplicons required two or less temperatures.

[0168] TABLE 3
Novel alterations identified in SCN1A

| | | | | SEQ |
|---|---|---|---|---|
| | | | | ID |
| Patient | Mutation | Nucleotide | Amino Acid | Num- |
| Diagnosis¹ | Type | Change² | Change³ | bers |
| SMEI | Missense | c251A→G | Y84C | 1, 26 |
| SMEI | Missense | c301C→T | R101W | 2, 27 |
| SMEI | Missense | c512T→A | I171K | 3, 28 |
| SMEI | Missense | c596C→G | T199R | 4, 29 |
| SMEI⁴ | Missense | c677C→T | T226M | 5, 30 |
| SMEI | Missense | c715G→A | A239T | 6, 31 |
| SMEI | Missense | c2837G→A | R946H | 7, 32 |
| SMEI | Missense | c3714A→C | E1238D | 8, 33 |
| SMEI | Missense | c4186T→G | C1396G | 9, 34 |
| SMEI | Missense | c4321G→C | A1441P | 10, 35 |
| SMEI | Missense | c4633A→G | I1545V | 11, 36 |
| SMEI | Missense | c4934G→A | R1645Q | 12, 37 |
| SMEI | Missense | c5119T→G | F1707V | 13, 38 |
| SMEI | Missense | c5347G→A | A1783T | 14, 39 |
| SMEI | Truncation | c41delT | F14fsX91 | 15, 40 |
| SMEI | Truncation | c496insGTGAATC | T166fsX170 | 16, 41 |
| SMEI | Truncation | c1687delC | L563fsX622 | 17, 42 |
| SMEI | Truncation | c3231delA | K1077fsX1079 | 18, 43 |
| SMEI | Truncation | c3561-3562delAA | Q1187fsX1215 | 19, 44 |
| SMEI | Truncation | c4062delT | C1354fsX1359 | 20, 45 |
| SMEI | Truncation | c4526delA | N1509fsX1511 | 21, 46 |
| SMEI | Nonsense | c3022G→T | E1008X | 22, 47 |
| SMEI | Nonsense | c4279C→T | Q1427X | 23, 48 |
| SMEI³ | Splice Site | IVS4+5G→A | — | 24 |
| SMEI³ | Splice Site | IVS3-13T→A | — | 25 |
| Non-SMEI | Missense | c580G→A | D194N | 49, 54 |
| Non-SMEI | Missense | c4439G→T | G1480V | 50, 55 |
| Non-SMEI | Missense | c4907G→A | R1636Q | 51, 56 |
| Non-SMEI | Truncation | c1724delT | F575fsX622 | 52, 57 |
| Non-SMEI | Truncation | c5741-5742delAA | Q1914fsX1943 | 53, 58 |

Note:
¹Patient diagnosis was based on the initial clinical observations.
²Numbering is based on the large SCN1A isoform.
³These splice site alterations were seen in the same individual.
⁴This alteration was also seen in an individual that was not clinically diagnosed with SMEI.

[0169] References

[0170] References cited herein are listed on the following pages, and are incorporated herein by this reference.

[0171] Annegers, J F. (1996). The treatment of epilepsy: Principles and practice. Second Edition. (Wyllie E (Ed) Williams and Wilkins).

[0172] Berkovic, S F. et al. (1987). Neurology 37: 993-1000.

[0173] Berkovic, S F. et al. (1994). In: Epileptic seizures and syndromes. Wolf, P. (Editor). London: John Libbey. 25-37.

[0174] Bourgeois, B F D. (2003). Epilepsia 44(s2): 27-31.

[0175] Breaker, R R. and Joyce, G F. (1995). Chem. Biol. 2: 655-600.

[0176] Claes, L. et al. (2001). Am. J. Hum. Genet. 68: 1327-1332.

[0177] Cole, S P. et al. (1984). Mol. Cell Biochem. 62: 109-120.

[0178] Commission on Classification and Terminology of the International League against Epilepsy. (1989). Epilepsia 30: 389-399.

[0179] Cote, R J. et al. (1983). Proc. Natl. Acad. Sci. USA 80: 2026-2030.

[0180] Escayg, A. et al. (2000). Nature Genet. 24: 343-345.

[0181] Finkelstein, J. et al. (1990). Genomics 7: 167-172.

[0182] Gardiner, M. (2000). J Neurol. 247: 327-334.

[0183] Goldman, C K. et al. (1997). Nature Biotechnology 15: 462-466.

[0184] Gonzalez, J E. et al. (1999). Drug Discov. Today 4: 431-439.

[0185] Hamill, O P. et al. (1981). Pflugers Arch. 391: 85-100.

[0186] Haseloff, J. and Gerlach, W L. (1988). Nature 334: 585-591.

[0187] Heller, R A. et al. (1997). Proc. Natl. Acad. Sci. USA 94: 2150-2155.

[0188] Huse, W D. et al. (1989). Science 246: 1275-1281.

[0189] Kinszler, K W. et al. (1991). Science 251: 1366-1370.

[0190] Kohler, G. and Milstein, C. (1975). Nature 256: 495-497.

[0191] Kozbor, D. et al. (1985). J. Immunol. Methods 81:31-42.

[0192] Maxam, A M. and Gilbert, W. (1977). Proc. Natl. Acad. Sci. USA 74: 560-564.

[0193] Modrich, P. (1991). Ann. Rev. Genet. 25: 229-253.

[0194] Mulley, J C. et al. (2003). Curr. Opin. Neurol. 16: 171-176.

[0195] Nabbout, R. et al. (2003). Neurology 60: 1961-1967.

[0196] Ohmori, I. et al. (2002). Biochem. Biophys. Res. Commun. 295: 17-23.

[0197] Orita, M. et al. (1989). Proc. Natl. Acad. Sci USA 86: 2766-2770.

[0198] Orlandi, R. et al. (1989). Proc. Natl. Acad. Sci. USA 86: 3833-3837.

[0199] Reutens, D C. and Berkovic, S F. (1995). Neurology 45: 1469-1476.

[0200] Rickert, R C. et al. (1997). Nucleic Acids Res. 25: 1317-1318.

[0201] Roger, J. et al. (1992). Epileptic syndromes in infancy, childhood and adolescence. 2nd Edition. London, John Libbey.

[0202] Sanger, F. et al. (1977). Proc. Natl. Acad. Sci. USA 74: 5463-5467.

[0203] Scharf, K D. et al. (1994). Results Probl. Cell Differ. 20: 125-162.

[0204] Scheffer, I E. and Berkovic, S F. (1997). Brain 120: 479-90.

[0205] Scheffer, I E. and Berkovic, S F. (2003). Trends Pharmac. Sci. 24: 428-433.

[0206] Schena, M. et al. (1996). Proc. Natl. Acad. Sci. USA 93: 10614-10619.

[0207] Schwenk, F. et al. (1995). Nucleic Acids Res. 23: 5080-5081.

[0208] Sheffield, V C. et al. (1989). Proc. Natl. Acad. Sci. USA 86: 232-236.

[0209] Singh, R. et al. (1999). Ann. Neurol. 45: 75-81.

[0210] Singh, R. et al. (2001). Epilepsia 42: 837-844.

[0211] Sugawara, T. et al. (2002). Neurology 58: 1122-1124.

[0212] Sutton, G C. (1990). The principles and practice of medical genetics. Second Edition. (Churchill Livingstone, N.Y.).

[0213] Taylor, G R. and Deeble, J. (1999). Gen. Anal. Biomolec. Engin. 14: 181-186.

[0214] Veggiotti, P. et al. (2001). Epileptic. Disord. 3: 29-32.

[0215] Wallace, et al. (1998). Nature Genet. 19: 366-370.

[0216] Wartell, R M. et al. (1990). Nucleic Acids Res. 18: 2699-2705.

[0217] Winter, G. and Milstein, C. (1991). Nature 349: 293-299.

[0218] Wyman, A R. and White, R. (1980). Proc. Natl. Acad. Sci. 77: 6754-6758.

1. A method for the diagnosis of SMEI in a patient comprising:
(1) detecting an alteration in the SCN1A gene, including in a regulatory region of the gene, in a patient sample;
(2) ascertaining whether the alteration is known to be SMEI associated or non-SMEI associated; and
(3) (a) establishing a diagnosis of a high probability of SMEI where the alteration is known to be SMEI associated; or
(b) establishing a diagnosis of a low probability of SMEI where the alteration is non-SMEI associated; or
(d) or, if not known to be either,
(i) considering genetic data for parents and/or relatives;
(ii) establishing whether the alteration has arisen de novo or is inherited; and
(iii) establishing a diagnosis of a low probability of SMEI where the alteration is inherited but a diagnosis of a high probability of SMEI if the alteration is de novo.

2. A method as claimed in claim 1 further comprising establishing whether the alteration would result in a major disruption to the protein and, if de novo, establishing a diagnosis of a very high probability of SMEI.

3. A method as claimed in claim 2 wherein the alteration is a truncating mutation.

4. A method as claimed in claim 1 wherein the alteration is one identified in Table 3 as SMEI associated or non-SMEI associated.

5. A method as claimed in claim 1 comprising performing one or more assays to test for the existence of an SCN1A alteration and to identify the nature of the alteration.

6. A method as claimed in claim 5 comprising:
(1) performing one or more assays to test for the existence of an alteration in the SCN1A gene of the patient; and if the results indicate the existence of an alteration in the SCN1A gene;
(2) performing one or more assays to identify the nature of the SCN1A alteration.

7. A method as claimed in claim 5 wherein one of the assays is a DNA hybridisation assay.

8. A method as claimed in claim 7 wherein an SCN1A gene probe, an SCN1A exon-specific probe, or an SCN1A allele specific probe is hybridised to genomic DNA isolated from said patient.

9. A method as claimed in claim 5 wherein one of the assays is high performance liquid chromatography.

10. A method as claimed in claim 5 wherein one of the assays is an electrophoretic assay.

11. A method as claimed in claim 5 wherein the sample DNA to be tested is quantitatively amplified for at least one exon of the SCN1A gene to produce amplified fragments and the length of the amplification products for each amplified exon is compared to the length of the amplification products obtained when a wild-type SCN1A gene is amplified using the same primers, whereby differences in length between an amplified sample exon and the corresponding amplified wild-type exon reflect the occurrence of a truncating alteration in the sample SCN1A gene.

12. A method as claimed in claim 5 wherein one of the assays incorporates DNA amplification using SCN1A allele specific oligonucleotides.

13. A method as claimed in claim 5 wherein one of the assays is SSCP analysis.

14. A method as claimed in claim 5 wherein one of the assays is RNase protection.

15. A method as claimed in claim 5 wherein one of the assays is DGGE.

16. A method as claimed in claim 5 wherein one of the assays is an enzymatic assay.

17. A method as claimed in claim 16 wherein said assay incorporates the use of MutS.

18. A method as claimed in claim 5 wherein one of the assays examines the electrophoretic mobility of the SCN1A protein of the patient.

19. A method as claimed in claim 5 wherein one of the assays is an immunoassay.

20. A method as claimed in claim 5 wherein one of the assays is DNA sequencing.

21. A method for the diagnosis of SMEI in a patient, comprising:
detecting an alteration in the SCN1A gene, including in a regulatory region of the gene, in a patient sample, and establishing a diagnosis of a high probability of SMEI if a SMEI associated alteration as laid out in Table 3 is identified or, in the alternative, establishing an a diagnosis of a low probability of SMEI if a non-SMEI associated alteration as laid out in Table 3 is identified.

22. A method of determining the appropriate treatment for a SMEI patient comprising performing the method claimed in claim 1 or 21 and correlating the diagnosis reached with known indications and contra-indications for SMEI patients.

23. A method of determining the likelihood of adverse results from treatments of a SMEI patient including drug treatments and vaccinations comprising performing the method as claimed in claim 1 or 21 and correlating the diagnosis reached with known indications and contra-indications for SMEI patients.

The application's sequence listing, which the Patent Office published only in electronic form, follows.

SEQUENCE LISTING (58 sequences)

SEQ ID NO: 1 - DNA, 8381 bp, Homo sapiens
atactgcagaggtctctggtgcatgtgtgtatgtgtgcgtttgtgtgtgtttgtgtgtctgtgtgttctgccccagtgagactgcagcccttgtaaatactttgacaccttttgcaagaaggaatctgaacaattgcaactgaaggcacattgttatcatctcgtctttgggtgatgctgttcctcactgcagatggataattttccttttaatcaggaatttcatatgcagaataaatggtaattaaaatgtgcaggatgacaagatggagcaaacagtgcttgtaccaccaggacctgacagcttcaacttcttcaccagagaatctcttgcggctattgaaagacgcattgcagaagaaaaggcaaagaatcccaaaccagacaaaaaagatgacgacgaaaatggcccaaagccaaatagtgacttggaagctggaaagaaccttccatttatttatggagacattcctccagagatggtgtcagagcccctggaggacctggacccctactgtatcaataagaaaacttttatagtattgaataaattgaaggccatcttccggttcagtgccacctctgccctgtacattttaactcccttcaatcctcttaggaaaatagctattaagattttggtacattcattattcagcatgctaattatgtgcactattttgacaaactgtgtgtttatgacaatgagtaaccctcctgattggacaaagaatgtagaatacaccttcacaggaatatatacttttgaatcacttataaaaattattgcaaggggattctgtttagaagattttactttccttcgggatccatggaactggctcgatttcactgtcattacatttgcgtacgtcacagagtttgtggacctgggcaatgtctcggcattgagaacattcagagttctccgagcattgaagacgatttcagtcattccaggcctgaaaaccattgtgggagccctgatccagtctgtgaagaagctctcagatgtaatgatcctgactgtgttctgtctgagcgtatttgctctaattgggctgcagctgttcatgggcaacctgaggaataaatgtatacaatggcctcccaccaatgcttccttggaggaacatagtatagaaaagaatataactgtgaattataatggtacacttataaatgaaactgtctttgagtttgactggaagtcatatattcaagattcaagatatcattatttcctggagggttttttagatgcactactatgtggaaatagctctgatgcaggccaatgtccagagggatatatgtgtgtgaaagctggtagaaatcccaattatggctacacaagctttgataccttcagttgggcttttttgtccttgtttcgactaatgactcaggacttctgggaaaatctttatcaactgacattacgtgctgctgggaaaacgtacatgatattttttgtattggtcattttcttgggctcattctacctaataaatttgatcctggctgtggtggccatggcctacgaggaacagaatcaggccaccttggaagaagcagaacagaaagaggccgaatttcagcagatgattgaacagcttaaaaagcaacaggaggcagctcagcaggcagcaacggcaactgcctcagaacattccagagagcccagtgcagcaggcaggctctcagacagctcatctgaagcctctaagttgagttccaagagtgctaaggaaagaagaaatcggaggaagaaaagaaaacagaaagagcagtctggtggggaagagaaagatgaggatgaattccaaaaatctgaatctgaggacagcatcaggaggaaaggttttcgcttctccattgaagggaaccgattgacatatgaaaagaggtactcctccccacaccagtctttgttgagcatccgtggctccctattttcaccaaggcgaaatagcagaacaagccttttcagctttagagggcgagcaaaggatgtgggatctgagaacgacttcgcagatgatgagcacagcacctttgaggataacgagagccgtagagattccttgtttgtgccccgacgacacggagagagacgcaacagcaacctgagtcagaccagtaggtcatcccggatgctggcagtgtttccagcgaatgggaagatgcacagcactgtggattgcaatggtgtggtttccttggttggtggaccttcagttcctacatcgcctgttggacagcttctgccagaggtgataatagataagccagctactgatgacaatggaacaaccactgaaactgaaatgagaaagagaaggtcaagttctttccacgtttccatggactttctagaagatccttcccaaaggcaacgagcaatgagtatagccagcattctaacaaatacagtagaagaacttgaagaatccaggcagaaatgcccaccctgttggtataaattttccaacatattcttaatctgggactgttctccatattggttaaaagtgaaacatgttgtcaacctggttgtgatggacccatttgttgacctggccatcaccatctgtattgtcttaaatactcttttcatggccatggagcactatccaatgacggaccatttcaataatgtgcttacagtaggaaacttggttttcactgggatctttacagcagaaatgtttctgaaaattattgccatggatccttactattatttccaagaaggctggaatatctttgacggttttattgtgacgcttagcctggtagaacttggactcgccaatgtggaaggattatctgttctccgttcatttcgattgctgcgagttttcaagttggcaaaatcttggccaacgttaaatatgctaataaagatcatcggcaattccgtgggggctctgggaaatttaaccctcgtcttggccatcatcgtcttcatttttgccgtggtcggcatgcagctctttggtaaaagctacaaagattgtgtctgcaagatcgccagtgattgtcaactcccacgctggcacatgaatgacttcttccactccttcctgattgtgttccgcgtgctgtgtggggagtggatagagaccatgtgggactgtatggaggttgctggtcaagccatgtgccttactgtcttcatgatggtcatggtgattggaaacctagtggtcctgaatctctttctggccttgcttctgagctcatttagtgcagacaaccttgcagccactgatgatgataatgaaatgaataatctccaaattgctgtggataggatgcacaaaggagtagcttatgtgaaaagaaaaatatatgaatttattcaacagtccttcattaggaaacaaaagattttagatgaaattaaaccacttgatgatctaaacaacaagaaagacagttgtatgtccaatcatacaacagaaattgggaaagatcttgactatcttaaagatgtaaatggaactacaagtggtataggaactggcagcagtgttgaaaaatacattattgatgaaagtgattacatgtcattcataaacaaccccagtcttactgtgactgtaccaattgctgtaggagaatctgactttgaaaatttaaacacggaagactttagtagtgaatcggatctggaagaaagcaaagagaaactgaatgaaagcagtagctcatcagaaggtagcactgtggacatcggcgcacctgtagaagaacagcccgtagtggaacctgaagaaactcttgaaccagaagcttgtttcactgaaggctgtgtacaaagattcaagtgttgtcaaatcaatgtggaagaaggcagaggaaaacaatggtggaacctgagaaggacgtgtttccgaatagttgaacataactggtttgagaccttcattgttttcatgattctccttagtagtggtgctctggcatttgaagatatatatattgatcagcgaaagacgattaagacgatgttggaatatgctgacaaggttttcacttacattttcattctggaaatgcttctaaaatgggtggcatatggctatcaaacatatttcaccaatgcctggtgttggctggacttcttaattgttgatgtttcattggtcagtttaacagcaaatgccttgggttactcagaacttggagccatcaaatctctcaggacactaagagctctgagacctctaagagccttatctcgatttgaagggatgagggtggttgtgaatgcccttttaggagcaattccatccatcatgaatgtgcttctggtttgtcttatattctggctaattttcagcatcatgggcgtaaatttgtttgctggcaaattctaccactgtattaacaccacaactggtgacaggtttgacatcgaagacgtgaataatcatactgattgcctaaaactaatagaaagaaatgagactgctcgatggaaaaatgtgaaagtaaactttgataatgtaggatttgggtatctctctttgcttcaagttgccacattcaaaggatggatggatataatgtatgcagcagttgattccagaaatgtggaactccagcctaagtatgaaaaaagtctgtacatgtatctttactttgttattttcatcatctttgggtccttcttcaccttgaacctgtttattggtgtcatcatagataatttcaaccagcagaaaaagaagtttggaggtcaagacatctttatgacagaagaacagaagaaatactataatgcaatgaaaaaattaggatcgaaaaaaccgcaaaagcctatacctcgaccaggaaacaaatttcaaggaatggtctttgacttcgtaaccagacaagtttttgacataagcatcatgattctcatctgtcttaacatggtcacaatgatggtggaaacagatgaccagagtgaatatgtgactaccattttgtcacgcatcaatctggtgttcattgtgctatttactggagagtgtgtactgaaactcatctctctacgccattattattttaccattggatggaatatttttgattttgtggttgtcattctctccattgtaggtatgtttcttgccgagctgatagaaaagtatttcgtgtcccctaccctgttccgagtgatccgtcttgctaggattggccgaatcctacgtctgatcaaaggagcaaaggggatccgcacgctgctctttgctttgatgatgtcccttcctgcgttgtttaacatcggcctcctactcttcctagtcatgttcatctacgccatctttgggatgtccaactttgcctatgttaagagggaagttgggatcgatgacatgttcaactttgagacctttggcaacagcatgatctgcctattccaaattacaacctctgctggctgggatggattgctagcacccattctcaacagtaagccacccgactgtgaccctaataaagttaaccctggaagctcagttaagggagactgtgggaacccatctgttggaattttcttttttgtcagttacatcatcatatccttcctggttgtggtgaacatgtacatcgcggtcatcctggagaacttcagtgttgctactgaagaaagtgcagagcctctgagtgaggatgactttgagatgttctatgaggtttgggagaagtttgatcccgatgcaactcagttcatggaatttgaaaaattatctcagtttgcagctgcgcttgaaccgcctctcaatctgccacaaccaaacaaactccagctcattgccatggatttgcccatggtgagtggtgaccggatccactgtcttgatatcttatttgcttttacaaagcgggttctaggagagagtggagagatggatgctctacgaatacagatggaagagcgattcatggcttccaatccttccaaggtctcctatcagccaatcactactactttaaaacgaaaacaagaggaagtatctgctgtcattattcagcgtgcttacagacgccaccttttaaagcgaactgtaaaacaagcttcctttacgtacaataaaaacaaaatcaaaggtggggctaatcttcttataaaagaagacatgataattgacagaataaatgaaaactctattacagaaaaaactgatctgaccatgtccactgcagcttgtccaccttcctatgaccgggtgacaaagccaattgtggaaaaacatgagcaagaaggcaaagatgaaaaagccaaagggaaataaatgaaaataaataaaaataattgggtgacaaattgtttacagcctgtgaaggtgatgtatttttatcaacaggactcctttaggaggtcaatgccaaactgactgtttttacacaaatctccttaaggtcagtgcctacaataagacagtgaccccttgtcagcaaactgtgactctgtgtaaaggggagatgaccttgacaggaggttactgttctcactaccagctgacactgctgaagataagatgcacaatggctagtcagactgtagggaccagtttcaaggggtgcaaacctgtgattttggggttgtttaacatgaaacactttagtgtagtaattgtatccactgtttgcatttcaactgccacatttgtcacatttttatggaatctgttagtggattcatctttttgttaatccatgtgtttattatatgtgactatttttgtaaacgaagtttctgttgagaaataggctaaggacctctataacaggtatgccacctggggggtatggcaaccacatggccctcccagctacacaaagtcgtggtttgcatgagggcatgctgcacttagagatcatgcatgagaaaaagtcacaagaaaaacaaattcttaaatttcaccatatttctgggaggggtaattgggtgataagtggaggtgctttgttgatcttgttttgcgaaatccagcccctagaccaagtagattatttgtgggtaggccagtaaatcttagcaggtgcaaacttcattcaaatgtttggagtcataaatgttatgtttctttttgttgtattaaaaaaaaaacctgaatagtgaatattgcccctcaccctccaccgccagaagactgaattgaccaaaattactctttataaatttctgctttttcctgcactttgtttagccatctttgggctctcagcaaggttgacactgtatatgttaatgaaatgctatttattatgtaaatagtcattttaccctgtggtgcacgtttgagcaaacaaataatgacctaagcacagtatttattgcatcaaatatgtaccacaagaaatgtagagtgcaagctttacacaggtaataaaatgtattctgtaccatttatagatagtttggatgctatcaatgcatgtttatattaccatgctgctgtatctggtttctctcactgctcagaatctcatttatgagaaaccatatgtcagtggtaaagtcaaggaaattgttcaacagatctcatttatttaagtcattaagcaatagtttgcagcactttaacagctttttggttatttttacattttaagtggataacatatggtatatagccagactgtacagacatgtttaaaaaaacacactgcttaacctattaaatatgtgtttagaattttataagcaaatataaatactgtaaaaagtcactttattttatttttcagcattatgtacataaatatgaagaggaaattatcttcaggttgatatcacaatcacttttcttactttctgtccatagtactttttcatgaaagaaatttgctaaataagacatgaaaacaagactgggtagttgtagatttctgctttttaaattacatttgctaattttagattatttcacaattttaaggagcaaaataggttcacgattcatatccaaattatgctttgcaattggaaaagggtttaaaattttatttatatttctggtagtacctgtactaactgaattgaaggtagtgcttatgttatttttgttctttttttctgacttcggtttatgttttcatttctttggagtaatgctgctctagattgttctaaatagaatgtgggcttcataatttttttttccacaaaaacagagtagtcaacttatatagtcaattacatcaggacattttgtgtttcttacagaagcaaaccataggctcctcttttccttaaaactacttagataaactgtattcgtgaactgcatgctggaaaatgctactattatgctaaataatgctaaccaacatttaaaatgtgcaaaactaataaagattacattttttatttt

SEQ ID NO: 2 - DNA, 8381 bp, Homo sapiens
atactgcagaggtctctggtgcatgtgtgtatgtgtgcgtttgtgtgtgtttgtgtgtctgtgtgttctgccccagtgagactgcagcccttgtaaatactttgacaccttttgcaagaaggaatctgaacaattgcaactgaaggcacattgttatcatctcgtctttgggtgatgctgttcctcactgcagatggataattttccttttaatcaggaatttcatatgcagaataaatggtaattaaaatgtgcaggatgacaagatggagcaaacagtgcttgtaccaccaggacctgacagcttcaacttcttcaccagagaatctcttgcggctattgaaagacgcattgcagaagaaaaggcaaagaatcccaaaccagacaaaaaagatgacgacgaaaatggcccaaagccaaatagtgacttggaagctggaaagaaccttccatttatttatggagacattcctccagagatggtgtcagagcccctggaggacctggacccctactatatcaataagaaaacttttatagtattgaataaattgaaggccatcttctggttcagtgccacctctgccctgtacattttaactcccttcaatcctcttaggaaaatagctattaagattttggtacattcattattcagcatgctaattatgtgcactattttgacaaactgtgtgtttatgacaatgagtaaccctcctgattggacaaagaatgtagaatacaccttcacaggaatatatacttttgaatcacttataaaaattattgcaaggggattctgtttagaagattttactttccttcgggatccatggaactggctcgatttcactgtcattacatttgcgtacgtcacagagtttgtggacctgggcaatgtctcggcattgagaacattcagagttctccgagcattgaagacgatttcagtcattccaggcctgaaaaccattgtgggagccctgatccagtctgtgaagaagctctcagatgtaatgatcctgactgtgttctgtctgagcgtatttgctctaattgggctgcagctgttcatgggcaacctgaggaataaatgtatacaatggcctcccaccaatgcttccttggaggaacatagtatagaaaagaatataactgtgaattataatggtacacttataaatgaaactgtctttgagtttgactggaagtcatatattcaagattcaagatatcattatttcctggagggttttttagatgcactactatgtggaaatagctctgatgcaggccaatgtccagagggatatatgtgtgtgaaagctggtagaaatcccaattatggctacacaagctttgataccttcagttgggcttttttgtccttgtttcgactaatgactcaggacttctgggaaaatctttatcaactgacattacgtgctgctgggaaaacgtacatgatattttttgtattggtcattttcttgggctcattctacctaataaatttgatcctggctgtggtggccatggcctacgaggaacagaatcaggccaccttggaagaagcagaacagaaagaggccgaatttcagcagatgattgaacagcttaaaaagcaacaggaggcagctcagcaggcagcaacggcaactgcctcagaacattccagagagcccagtgcagcaggcaggctctcagacagctcatctgaagcctctaagttgagttccaagagtgctaaggaaagaagaaatcggaggaagaaaagaaaacagaaagagcagtctggtggggaagagaaagatgaggatgaattccaaaaatctgaatctgaggacagcatcaggaggaaaggttttcgcttctccattgaagggaaccgattgacatatgaaaagaggtactcctccccacaccagtctttgttgagcatccgtggctccctattttcaccaaggcgaaatagcagaacaagccttttcagctttagagggcgagcaaaggatgtgggatctgagaacgacttcgcagatgatgagcacagcacctttgaggataacgagagccgtagagattccttgtttgtgccccgacgacacggagagagacgcaacagcaacctgagtcagaccagtaggtcatcccggatgctggcagtgtttccagcgaatgggaagatgcacagcactgtggattgcaatggtgtggtttccttggttggtggaccttcagttcctacatcgcctgttggacagcttctgccagaggtgataatagataagccagctactgatgacaatggaacaaccactgaaactgaaatgagaaagagaaggtcaagttctttccacgtttccatggactttctagaagatccttcccaaaggcaacgagcaatgagtatagccagcattctaacaaatacagtagaagaacttgaagaatccaggcagaaatgcccaccctgttggtataaattttccaacatattcttaatctgggactgttctccatattggttaaaagtgaaacatgttgtcaacctggttgtgatggacccatttgttgacctggccatcaccatctgtattgtcttaaatactcttttcatggccatggagcactatccaatgacggaccatttcaataatgtgcttacagtaggaaacttggttttcactgggatctttacagcagaaatgtttctgaaaattattgccatggatccttactattatttccaagaaggctggaatatctttgacggttttattgtgacgcttagcctggtagaacttggactcgccaatgtggaaggattatctgttctccgttcatttcgattgctgcgagttttcaagttggcaaaatcttggccaacgttaaatatgctaataaagatcatcggcaattccgtgggggctctgggaaatttaaccctcgtcttggccatcatcgtcttcatttttgccgtggtcggcatgcagctctttggtaaaagctacaaagattgtgtctgcaagatcgccagtgattgtcaactcccacgctggcacatgaatgacttcttccactccttcctgattgtgttccgcgtgctgtgtggggagtggatagagaccatgtgggactgtatggaggttgctggtcaagccatgtgccttactgtcttcatgatggtcatggtgattggaaacctagtggtcctgaatctctttctggccttgcttctgagctcatttagtgcagacaaccttgcagccactgatgatgataatgaaatgaataatctccaaattgctgtggataggatgcacaaaggagtagcttatgtgaaaagaaaaatatatgaatttattcaacagtccttcattaggaaacaaaagattttagatgaaattaaaccacttgatgatctaaacaacaagaaagacagttgtatgtccaatcatacaacagaaattgggaaagatcttgactatcttaaagatgtaaatggaactacaagtggtataggaactggcagcagtgttgaaaaatacattattgatgaaagtgattacatgtcattcataaacaaccccagtcttactgtgactgtaccaattgctgtaggagaatctgactttgaaaatttaaacacggaagactttagtagtgaatcggatctggaagaaagcaaagagaaactgaatgaaagcagtagctcatcagaaggtagcactgtggacatcggcgcacctgtagaagaacagcccgtagtggaacctgaagaaactcttgaaccagaagcttgtttcactgaaggctgtgtacaaagattcaagtgttgtcaaatcaatgtggaagaaggcagaggaaaacaatggtggaacctgagaaggacgtgtttccgaatagttgaacataactggtttgagaccttcattgttttcatgattctccttagtagtggtgctctggcatttgaagatatatatattgatcagcgaaagacgattaagacgatgttggaatatgctgacaaggttttcacttacattttcattctggaaatgcttctaaaatgggtggcatatggctatcaaacatatttcaccaatgcctggtgttggctggacttcttaattgttgatgtttcattggtcagtttaacagcaaatgccttgggttactcagaacttggagccatcaaatctctcaggacactaagagctctgagacctctaagagccttatctcgatttgaagggatgagggtggttgtgaatgcccttttaggagcaattccatccatcatgaatgtgcttctggtttgtcttatattctggctaattttcagcatcatgggcgtaaatttgtttgctggcaaattctaccactgtattaacaccacaactggtgacaggtttgacatcgaagacgtgaataatcatactgattgcctaaaactaatagaaagaaatgagactgctcgatggaaaaatgtgaaagtaaactttgataatgtaggatttgggtatctctctttgcttcaagttgccacattcaaaggatggatggatataatgtatgcagcagttgattccagaaatgtggaactccagcctaagtatgaaaaaagtctgtacatgtatctttactttgttattttcatcatctttgggtccttcttcaccttgaacctgtttattggtgtcatcatagataatttcaaccagcagaaaaagaagtttggaggtcaagacatctttatgacagaagaacagaagaaatactataatgcaatgaaaaaattaggatcgaaaaaaccgcaaaagcctatacctcgaccaggaaacaaatttcaaggaatggtctttgacttcgtaaccagacaagtttttgacataagcatcatgattctcatctgtcttaacatggtcacaatgatggtggaaacagatgaccagagtgaatatgtgactaccattttgtcacgcatcaatctggtgttcattgtgctatttactggagagtgtgtactgaaactcatctctctacgccattattattttaccattggatggaatatttttgattttgtggttgtcattctctccattgtaggtatgtttcttgccgagctgatagaaaagtatttcgtgtcccctaccctgttccgagtgatccgtcttgctaggattggccgaatcctacgtctgatcaaaggagcaaaggggatccgcacgctgctctttgctttgatgatgtcccttcctgcgttgtttaacatcggcctcctactcttcctagtcatgttcatctacgccatctttgggatgtccaactttgcctatgttaagagggaagttgggatcgatgacatgttcaactttgagacctttggcaacagcatgatctgcctattccaaattacaacctctgctggctgggatggattgctagcacccattctcaacagtaagccacccgactgtgaccctaataaagttaaccctggaagctcagttaagggagactgtgggaacccatctgttggaattttcttttttgtcagttacatcatcatatccttcctggttgtggtgaacatgtacatcgcggtcatcctggagaacttcagtgttgctactgaagaaagtgcagagcctctgagtgaggatgactttgagatgttctatgaggtttgggagaagtttgatcccgatgcaactcagttcatggaatttgaaaaattatctcagtttgcagctgcgcttgaaccgcctctcaatctgccacaaccaaacaaactccagctcattgccatggatttgcccatggtgagtggtgaccggatccactgtcttgatatcttatttgcttttacaaagcgggttctaggagagagtggagagatggatgctctacgaatacagatggaagagcgattcatggcttccaatccttccaaggtctcctatcagccaatcactactactttaaaacgaaaacaagaggaagtatctgctgtcattattcagcgtgcttacagacgccaccttttaaagcgaactgtaaaacaagcttcctttacgtacaataaaaacaaaatcaaaggtggggctaatcttcttataaaagaagacatgataattgacagaataaatgaaaactctattacagaaaaaactgatctgaccatgtccactgcagcttgtccaccttcctatgaccgggtgacaaagccaattgtggaaaaacatgagcaagaaggcaaagatgaaaaagccaaagggaaataaatgaaaataaataaaaataattgggtgacaaattgtttacagcctgtgaaggtgatgtatttttatcaacaggactcctttaggaggtcaatgccaaactgactgtttttacacaaatctccttaaggtcagtgcctacaataagacagtgaccccttgtcagcaaactgtgactctgtgtaaaggggagatgaccttgacaggaggttactgttctcactaccagctgacactgctgaagataagatgcacaatggctagtcagactgtagggaccagtttcaaggggtgcaaacctgtgattttggggttgtttaacatgaaacactttagtgtagtaattgtatccactgtttgcatttcaactgccacatttgtcacatttttatggaatctgttagtggattcatctttttgttaatccatgtgtttattatatgtgactatttttgtaaacgaagtttctgttgagaaataggctaaggacctctataacaggtatgccacctggggggtatggcaaccacatggccctcccagctacacaaagtcgtggtttgcatgagggcatgctgcacttagagatcatgcatgagaaaaagtcacaagaaaaacaaattcttaaatttcaccatatttctgggaggggtaattgggtgataagtggaggtgctttgttgatcttgttttgcgaaatccagcccctagaccaagtagattatttgtgggtaggccagtaaatcttagcaggtgcaaacttcattcaaatgtttggagtcataaatgttatgtttctttttgttgtattaaaaaaaaaacctgaatagtgaatattgcccctcaccctccaccgccagaagactgaattgaccaaaattactctttataaatttctgctttttcctgcactttgtttagccatctttgggctctcagcaaggttgacactgtatatgttaatgaaatgctatttattatgtaaatagtcattttaccctgtggtgcacgtttgagcaaacaaataatgacctaagcacagtatttattgcatcaaatatgtaccacaagaaatgtagagtgcaagctttacacaggtaataaaatgtattctgtaccatttatagatagtttggatgctatcaatgcatgtttatattaccatgctgctgtatctggtttctctcactgctcagaatctcatttatgagaaaccatatgtcagtggtaaagtcaaggaaattgttcaacagatctcatttatttaagtcattaagcaatagtttgcagcactttaacagctttttggttatttttacattttaagtggataacatatggtatatagccagactgtacagacatgtttaaaaaaacacactgcttaacctattaaatatgtgtttagaattttataagcaaatataaatactgtaaaaagtcactttattttatttttcagcattatgtacataaatatgaagaggaaattatcttcaggttgatatcacaatcacttttcttactttctgtccatagtactttttcatgaaagaaatttgctaaataagacatgaaaacaagactgggtagttgtagatttctgctttttaaattacatttgctaattttagattatttcacaattttaaggagcaaaataggttcacgattcatatccaaattatgctttgcaattggaaaagggtttaaaattttatttatatttctggtagtacctgtactaactgaattgaaggtagtgcttatgttatttttgttctttttttctgacttcggtttatgttttcatttctttggagtaatgctgctctagattgttctaaatagaatgtgggcttcataatttttttttccacaaaaacagagtagtcaacttatatagtcaattacatcaggacattttgtgtttcttacagaagcaaaccataggctcctcttttccttaaaactacttagataaactgtattcgtgaactgcatgctggaaaatgctactattatgctaaataatgctaaccaacatttaaaatgtgcaaaactaataaagattacattttttatttt

SEQ ID NO: 3 - DNA, 8381 bp, Homo sapiens
atactgcagaggtctctggtgcatgtgtgtatgtgtgcgtttgtgtgtgtttgtgtgtctgtgtgttctgccccagtgagactgcagcccttgtaaatactttgacaccttttgcaagaaggaatctgaacaattgcaactgaaggcacattgttatcatctcgtctttgggtgatgctgttcctcactgcagatggataattttccttttaatcaggaatttcatatgcagaataaatggtaattaaaatgtgcaggatgacaagatggagcaaacagtgcttgtaccaccaggacctgacagcttcaacttcttcaccagagaatctcttgcggctattgaaagacgcattgcagaagaaaaggcaaagaatcccaaaccagacaaaaaagatgacgacgaaaatggcccaaagccaaatagtgacttggaagctggaaagaaccttccatttatttatggagacattcctccagagatggtgtcagagcccctggaggacctggacccctactatatcaataagaaaacttttatagtattgaataaattgaaggccatcttccggttcagtgccacctctgccctgtacattttaactcccttcaatcctcttaggaaaatagctattaagattttggtacattcattattcagcatgctaattatgtgcactattttgacaaactgtgtgtttatgacaatgagtaaccctcctgattggacaaagaatgtagaatacaccttcacaggaatatatacttttgaatcacttaaaaaaattattgcaaggggattctgtttagaagattttactttccttcgggatccatggaactggctcgatttcactgtcattacatttgcgtacgtcacagagtttgtggacctgggcaatgtctcggcattgagaacattcagagttctccgagcattgaagacgatttcagtcattccaggcctgaaaaccattgtgggagccctgatccagtctgtgaagaagctctcagatgtaatgatcctgactgtgttctgtctgagcgtatttgctctaattgggctgcagctgttcatgggcaacctgaggaataaatgtatacaatggcctcccaccaatgcttccttggaggaacatagtatagaaaagaatataactgtgaattataatggtacacttataaatgaaactgtctttgagtttgactggaagtcatatattcaagattcaagatatcattatttcctggagggttttttagatgcactactatgtggaaatagctctgatgcaggccaatgtccagagggatatatgtgtgtgaaagctggtagaaatcccaattatggctacacaagctttgataccttcagttgggcttttttgtccttgtttcgactaatgactcaggacttctgggaaaatctttatcaactgacattacgtgctgctgggaaaacgtacatgatattttttgtattggtcattttcttgggctcattctacctaataaatttgatcctggctgtggtggccatggcctacgaggaacagaatcaggccaccttggaagaagcagaacagaaagaggccgaatttcagcagatgattgaacagcttaaaaagcaacaggaggcagctcagcaggcagcaacggcaactgcctcagaacattccagagagcccagtgcagcaggcaggctctcagacagctcatctgaagcctctaagttgagttccaagagtgctaaggaaagaagaaatcggaggaagaaaagaaaacagaaagagcagtctggtggggaagagaaagatgaggatgaattccaaaaatctgaatctgaggacagcatcaggaggaaaggttttcgcttctccattgaagggaaccgattgacatatgaaaagaggtactcctccccacaccagtctttgttgagcatccgtggctccctattttcaccaaggcgaaatagcagaacaagccttttcagctttagagggcgagcaaaggatgtgggatctgagaacgacttcgcagatgatgagcacagcacctttgaggataacgagagccgtagagattccttgtttgtgccccgacgacacggagagagacgcaacagcaacctgagtcagaccagtaggtcatcccggatgctggcagtgtttccagcgaatgggaagatgcacagcactgtggattgcaatggtgtggtttccttggttggtggaccttcagttcctacatcgcctgttggacagcttctgccagaggtgataatagataagccagctactgatgacaatggaacaaccactgaaactgaaatgagaaagagaaggtcaagttctttccacgtttccatggactttctagaagatccttcccaaaggcaacgagcaatgagtatagccagcattctaacaaatacagtagaagaacttgaagaatccaggcagaaatgcccaccctgttggtataaattttccaacatattcttaatctgggactgttctccatattggttaaaagtgaaacatgttgtcaacctggttgtgatggacccatttgttgacctggccatcaccatctgtattgtcttaaatactcttttcatggccatggagcactatccaatgacggaccatttcaataatgtgcttacagtaggaaacttggttttcactgggatctttacagcagaaatgtttctgaaaattattgccatggatccttactattatttccaagaaggctggaatatctttgacggttttattgtgacgcttagcctggtagaacttggactcgccaatgtggaaggattatctgttctccgttcatttcgattgctgcgagttttcaagttggcaaaatcttggccaacgttaaatatgctaataaagatcatcggcaattccgtgggggctctgggaaatttaaccctcgtcttggccatcatcgtcttcatttttgccgtggtcggcatgcagctctttggtaaaagctacaaagattgtgtctgcaagatcgccagtgattgtcaactcccacgctggcacatgaatgacttcttccactccttcctgattgtgttccgcgtgctgtgtggggagtggatagagaccatgtgggactgtatggaggttgctggtcaagccatgtgccttactgtcttcatgatggtcatggtgattggaaacctagtggtcctgaatctctttctggccttgcttctgagctcatttagtgcagacaaccttgcagccactgatgatgataatgaaatgaataatctccaaattgctgtggataggatgcacaaaggagtagcttatgtgaaaagaaaaatatatgaatttattcaacagtccttcattaggaaacaaaagattttagatgaaattaaaccacttgatgatctaaacaacaagaaagacagttgtatgtccaatcatacaacagaaattgggaaagatcttgactatcttaaagatgtaaatggaactacaagtggtataggaactggcagcagtgttgaaaaatacattattgatgaaagtgattacatgtcattcataaacaaccccagtcttactgtgactgtaccaattgctgtaggagaatctgactttgaaaatttaaacacggaagactttagtagtgaatcggatctggaagaaagcaaagagaaactgaatgaaagcagtagctcatcagaaggtagcactgtggacatcggcgcacctgtagaagaacagcccgtagtggaacctgaagaaactcttgaaccagaagcttgtttcactgaaggctgtgtacaaagattcaagtgttgtcaaatcaatgtggaagaaggcagaggaaaacaatggtggaacctgagaaggacgtgtttccgaatagttgaacataactggtttgagaccttcattgttttcatgattctccttagtagtggtgctctggcatttgaagatatatatattgatcagcgaaagacgattaagacgatgttggaatatgctgacaaggttttcacttacattttcattctggaaatgcttctaaaatgggtggcatatggctatcaaacatatttcaccaatgcctggtgttggctggacttcttaattgttgatgtttcattggtcagtttaacagcaaatgccttgggttactcagaacttggagccatcaaatctctcaggacactaagagctctgagacctctaagagccttatctcgatttgaagggatgagggtggttgtgaatgcccttttaggagcaattccatccatcatgaatgtgcttctggtttgtcttatattctggctaattttcagcatcatgggcgtaaatttgtttgctggcaaattctaccactgtattaacaccacaactggtgacaggtttgacatcgaagacgtgaataatcatactgattgcctaaaactaatagaaagaaatgagactgctcgatggaaaaatgtgaaagtaaactttgataatgtaggatttgggtatctctctttgcttcaagttgccacattcaaaggatggatggatataatgtatgcagcagttgattccagaaatgtggaactccagcctaagtatgaaaaaagtctgtacatgtatctttactttgttattttcatcatctttgggtccttcttcaccttgaacctgtttattggtgtcatcatagataatttcaaccagcagaaaaagaagtttggaggtcaagacatctttatgacagaagaacagaagaaatactataatgcaatgaaaaaattaggatcgaaaaaaccgcaaaagcctatacctcgaccaggaaacaaatttcaaggaatggtctttgacttcgtaaccagacaagtttttgacataagcatcatgattctcatctgtcttaacatggtcacaatgatggtggaaacagatgaccagagtgaatatgtgactaccattttgtcacgcatcaatctggtgttcattgtgctatttactggagagtgtgtactgaaactcatctctctacgccattattattttaccattggatggaatatttttgattttgtggttgtcattctctccattgtaggtatgtttcttgccgagctgatagaaaagtatttcgtgtcccctaccctgttccgagtgatccgtcttgctaggattggccgaatcctacgtctgatcaaaggagcaaaggggatccgcacgctgctctttgctttgatgatgtcccttcctgcgttgtttaacatcggcctcctactcttcctagtcatgttcatctacgccatctttgggatgtccaactttgcctatgttaagagggaagttgggatcgatgacatgttcaactttgagacctttggcaacagcatgatctgcctattccaaattacaacctctgctggctgggatggattgctagcacccattctcaacagtaagccacccgactgtgaccctaataaagttaaccctggaagctcagttaagggagactgtgggaacccatctgttggaattttcttttttgtcagttacatcatcatatccttcctggttgtggtgaacatgtacatcgcggtcatcctggagaacttcagtgttgctactgaagaaagtgcagagcctctgagtgaggatgactttgagatgttctatgaggtttgggagaagtttgatcccgatgcaactcagttcatggaatttgaaaaattatctcagtttgcagctgcgcttgaaccgcctctcaatctgccacaaccaaacaaactccagctcattgccatggatttgcccatggtgagtggtgaccggatccactgtcttgatatcttatttgcttttacaaagcgggttctaggagagagtggagagatggatgctctacgaatacagatggaagagcgattcatggcttccaatccttccaaggtctcctatcagccaatcactactactttaaaacgaaaacaagaggaagtatctgctgtcattattcagcgtgcttacagacgccaccttttaaagcgaactgtaaaacaagcttcctttacgtacaataaaaacaaaatcaaaggtggggctaatcttcttataaaagaagacatgataattgacagaataaatgaaaactctattacagaaaaaactgatctgaccatgtccactgcagcttgtccaccttcctatgaccgggtgacaaagccaattgtggaaaaacatgagcaagaaggcaaagatgaaaaagccaaagggaaataaatgaaaataaataaaaataattgggtgacaaattgtttacagcctgtgaaggtgatgtatttttatcaacaggactcctttaggaggtcaatgccaaactgactgtttttacacaaatctccttaaggtcagtgcctacaataagacagtgaccccttgtcagcaaactgtgactctgtgtaaaggggagatgaccttgacaggaggttactgttctcactaccagctgacactgctgaagataagatgcacaatggctagtcagactgtagggaccagtttcaaggggtgcaaacctgtgattttggggttgtttaacatgaaacactttagtgtagtaattgtatccactgtttgcatttcaactgccacatttgtcacatttttatggaatctgttagtggattcatctttttgttaatccatgtgtttattatatgtgactatttttgtaaacgaagtttctgttgagaaataggctaaggacctctataacaggtatgccacctggggggtatggcaaccacatggccctcccagctacacaaagtcgtggtttgcatgagggcatgctgcacttagagatcatgcatgagaaaaagtcacaagaaaaacaaattcttaaatttcaccatatttctgggaggggtaattgggtgataagtggaggtgctttgttgatcttgttttgcgaaatccagcccctagaccaagtagattatttgtgggtaggccagtaaatcttagcaggtgcaaacttcattcaaatgtttggagtcataaatgttatgtttctttttgttgtattaaaaaaaaaacctgaatagtgaatattgcccctcaccctccaccgccagaagactgaattgaccaaaattactctttataaatttctgctttttcctgcactttgtttagccatctttgggctctcagcaaggttgacactgtatatgttaatgaaatgctatttattatgtaaatagtcattttaccctgtggtgcacgtttgagcaaacaaataatgacctaagcacagtatttattgcatcaaatatgtaccacaagaaatgtagagtgcaagctttacacaggtaataaaatgtattctgtaccatttatagatagtttggatgctatcaatgcatgtttatattaccatgctgctgtatctggtttctctcactgctcagaatctcatttatgagaaaccatatgtcagtggtaaagtcaaggaaattgttcaacagatctcatttatttaagtcattaagcaatagtttgcagcactttaacagctttttggttatttttacattttaagtggataacatatggtatatagccagactgtacagacatgtttaaaaaaacacactgcttaacctattaaatatgtgtttagaattttataagcaaatataaatactgtaaaaagtcactttattttatttttcagcattatgtacataaatatgaagaggaaattatcttcaggttgatatcacaatcacttttcttactttctgtccatagtactttttcatgaaagaaatttgctaaataagacatgaaaacaagactgggtagttgtagatttctgctttttaaattacatttgctaattttagattatttcacaattttaaggagcaaaataggttcacgattcatatccaaattatgctttgcaattggaaaagggtttaaaattttatttatatttctggtagtacctgtactaactgaattgaaggtagtgcttatgttatttttgttctttttttctgacttcggtttatgttttcatttctttggagtaatgctgctctagattgttctaaatagaatgtgggcttcataatttttttttccacaaaaacagagtagtcaacttatatagtcaattacatcaggacattttgtgtttcttacagaagcaaaccataggctcctcttttccttaaaactacttagataaactgtattcgtgaactgcatgctggaaaatgctactattatgctaaataatgctaaccaacatttaaaatgtgcaaaactaataaagattacattttttatttt

SEQ ID NO: 4 - DNA, 8381 bp, Homo sapiens
atactgcagaggtctctggtgcatgtgtgtatgtgtgcgtttgtgtgtgtttgtgtgtctgtgtgttctgccccagtgagactgcagcccttgtaaatactttgacaccttttgcaagaaggaatctgaacaattgcaactgaaggcacattgttatcatctcgtctttgggtgatgctgttcctcactgcagatggataattttccttttaatcaggaatttcatatgcagaataaatggtaattaaaatgtgcaggatgacaagatggagcaaacagtgcttgtaccaccaggacctgacagcttcaacttcttcaccagagaatctcttgcggctattgaaagacgcattgcagaagaaaaggcaaagaatcccaaaccagacaaaaaagatgacgacgaaaatggcccaaagccaaatagtgacttggaagctggaaagaaccttccatttatttatggagacattcctccagagatggtgtcagagcccctggaggacctggacccctactatatcaataagaaaacttttatagtattgaataaattgaaggccatcttccggttcagtgccacctctgccctgtacattttaactcccttcaatcctcttaggaaaatagctattaagattttggtacattcattattcagcatgctaattatgtgcactattttgacaaactgtgtgtttatgacaatgagtaaccctcctgattggacaaagaatgtagaatacaccttcacaggaatatatacttttgaatcacttataaaaattattgcaaggggattctgtttagaagattttactttccttcgggatccatggaactggctcgatttcactgtcattagatttgcgtacgtcacagagtttgtggacctgggcaatgtctcggcattgagaacattcagagttctccgagcattgaagacgatttcagtcattccaggcctgaaaaccattgtgggagccctgatccagtctgtgaagaagctctcagatgtaatgatcctgactgtgttctgtctgagcgtatttgctctaattgggctgcagctgttcatgggcaacctgaggaataaatgtatacaatggcctcccaccaatgcttccttggaggaacatagtatagaaaagaatataactgtgaattataatggtacacttataaatgaaactgtctttgagtttgactggaagtcatatattcaagattcaagatatcattatttcctggagggttttttagatgcactactatgtggaaatagctctgatgcaggccaatgtccagagggatatatgtgtgtgaaagctggtagaaatcccaattatggctacacaagctttgataccttcagttgggcttttttgtccttgtttcgactaatgactcaggacttctgggaaaatctttatcaactgacattacgtgctgctgggaaaacgtacatgatattttttgtattggtcattttcttgggctcattctacctaataaatttgatcctggctgtggtggccatggcctacgaggaacagaatcaggccaccttggaagaagcagaacagaaagaggccgaatttcagcagatgattgaacagcttaaaaagcaacaggaggcagctcagcaggcagcaacggcaactgcctcagaacattccagagagcccagtgcagcaggcaggctctcagacagctcatctgaagcctctaagttgagttccaagagtgctaaggaaagaagaaatcggaggaagaaaagaaaacagaaagagcagtctggtggggaagagaaagatgaggatgaattccaaaaatctgaatctgaggacagcatcaggaggaaaggttttcgcttctccattgaagggaaccgattgacatatgaaaagaggtactcctccccacaccagtctttgttgagcatccgtggctccctattttcaccaaggcgaaatagcagaacaagccttttcagctttagagggcgagcaaaggatgtgggatctgagaacgacttcgcagatgatgagcacagcacctttgaggataacgagagccgtagagattccttgtttgtgccccgacgacacggagagagacgcaacagcaacctgagtcagaccagtaggtcatcccggatgctggcagtgtttccagcgaatgggaagatgcacagcactgtggattgcaatggtgtggtttccttggttggtggaccttcagttcctacatcgcctgttggacagcttctgccagaggtgataatagataagccagctactgatgacaatggaacaaccactgaaactgaaatgagaaagagaaggtcaagttctttccacgtttccatggactttctagaagatccttcccaaaggcaacgagcaatgagtatagccagcattctaacaaatacagtagaagaacttgaagaatccaggcagaaatgcccaccctgttggtataaattttccaacatattcttaatctgggactgttctccatattggttaaaagtgaaacatgttgtcaacctggttgtgatggacccatttgttgacctggccatcaccatctgtattgtcttaaatactcttttcatggccatggagcactatccaatgacggaccatttcaataatgtgcttacagtaggaaacttggttttcactgggatctttacagcagaaatgtttctgaaaattattgccatggatccttactattatttccaagaaggctggaatatctttgacggttttattgtgacgcttagcctggtagaacttggactcgccaatgtggaaggattatctgttctccgttcatttcgattgctgcgagttttcaagttggcaaaatcttggccaacgttaaatatgctaataaagatcatcggcaattccgtgggggctctgggaaatttaaccctcgtcttggccatcatcgtcttcatttttgccgtggtcggcatgcagctctttggtaaaagctacaaagattgtgtctgcaagatcgccagtgattgtcaactcccacgctggcacatgaatgacttcttccactccttcctgattgtgttccgcgtgctgtgtggggagtggatagagaccatgtgggactgtatggaggttgctggtcaagccatgtgccttactgtcttcatgatggtcatggtgattggaaacctagtggtcctgaatctctttctggccttgcttctgagctcatttagtgcagacaaccttgcagccactgatgatgataatgaaatgaataatctccaaattgctgtggataggatgcacaaaggagtagcttatgtgaaaagaaaaatatatgaatttattcaacagtccttcattaggaaacaaaagattttagatgaaattaaaccacttgatgatctaaacaacaagaaagacagttgtatgtccaatcatacaacagaaattgggaaagatcttgactatcttaaagatgtaaatggaactacaagtggtataggaactggcagcagtgttgaaaaatacattattgatgaaagtgattacatgtcattcataaacaaccccagtcttactgtgactgtaccaattgctgtaggagaatctgactttgaaaatttaaacacggaagactttagtagtgaatcggatctggaagaaagcaaagagaaactgaatgaaagcagtagctcatcagaaggtagcactgtggacatcggcgcacctgtagaagaacagcccgtagtggaacctgaagaaactcttgaaccagaagcttgtttcactgaaggctgtgtacaaagattcaagtgttgtcaaatcaatgtggaagaaggcagaggaaaacaatggtggaacctgagaaggacgtgtttccgaatagttgaacataactggtttgagaccttcattgttttcatgattctccttagtagtggtgctctggcatttgaagatatatatattgatcagcgaaagacgattaagacgatgttggaatatgctgacaaggttttcacttacattttcattctggaaatgcttctaaaatgggtggcatatggctatcaaacatatttcaccaatgcctggtgttggctggacttcttaattgttgatgtttcattggtcagtttaacagcaaatgccttgggttactcagaacttggagccatcaaatctctcaggacactaagagctctgagacctctaagagccttatctcgatttgaagggatgagggtggttgtgaatgcccttttaggagcaattccatccatcatgaatgtgcttctggtttgtcttatattctggctaattttcagcatcatgggcgtaaatttgtttgctggcaaattctaccactgtattaacaccacaactggtgacaggtttgacatcgaagacgtgaataatcatactgattgcctaaaactaatagaaagaaatgagactgctcgatggaaaaatgtgaaagtaaactttgataatgtaggatttgggtatctctctttgcttcaagttgccacattcaaaggatggatggatataatgtatgcagcagttgattccagaaatgtggaactccagcctaagtatgaaaaaagtctgtacatgtatctttactttgttattttcatcatctttgggtccttcttcaccttgaacctgtttattggtgtcatcatagataatttcaaccagcagaaaaagaagtttggaggtcaagacatctttatgacagaagaacagaagaaatactataatgcaatgaaaaaattaggatcgaaaaaaccgcaaaagcctatacctcgaccaggaaacaaatttcaaggaatggtctttgacttcgtaaccagacaagtttttgacataagcatcatgattctcatctgtcttaacatggtcacaatgatggtggaaacagatgaccagagtgaatatgtgactaccattttgtcacgcatcaatctggtgttcattgtgctatttactggagagtgtgtactgaaactcatctctctacgccattattattttaccattggatggaatatttttgattttgtggttgtcattctctccattgtaggtatgtttcttgccgagctgatagaaaagtatttcgtgtcccctaccctgttccgagtgatccgtcttgctaggattggccgaatcctacgtctgatcaaaggagcaaaggggatccgcacgctgctctttgctttgatgatgtcccttcctgcgttgtttaacatcggcctcctactcttcctagtcatgttcatctacgccatctttgggatgtccaactttgcctatgttaagagggaagttgggatcgatgacatgttcaactttgagacctttggcaacagcatgatctgcctattccaaattacaacctctgctggctgggatggattgctagcacccattctcaacagtaagccacccgactgtgaccctaataaagttaaccctggaagctcagttaagggagactgtgggaacccatctgttggaattttcttttttgtcagttacatcatcatatccttcctggttgtggtgaacatgtacatcgcggtcatcctggagaacttcagtgttgctactgaagaaagtgcagagcctctgagtgaggatgactttgagatgttctatgaggtttgggagaagtttgatcccgatgcaactcagttcatggaatttgaaaaattatctcagtttgcagctgcgcttgaaccgcctctcaatctgccacaaccaaacaaactccagctcattgccatggatttgcccatggtgagtggtgaccggatccactgtcttgatatcttatttgcttttacaaagcgggttctaggagagagtggagagatggatgctctacgaatacagatggaagagcgattcatggcttccaatccttccaaggtctcctatcagccaatcactactactttaaaacgaaaacaagaggaagtatctgctgtcattattcagcgtgcttacagacgccaccttttaaagcgaactgtaaaacaagcttcctttacgtacaataaaaacaaaatcaaaggtggggctaatcttcttataaaagaagacatgataattgacagaataaatgaaaactctattacagaaaaaactgatctgaccatgtccactgcagcttgtccaccttcctatgaccgggtgacaaagccaattgtggaaaaacatgagcaagaaggcaaagatgaaaaagccaaagggaaataaatgaaaataaataaaaataattgggtgacaaattgtttacagcctgtgaaggtgatgtatttttatcaacaggactcctttaggaggtcaatgccaaactgactgtttttacacaaatctccttaaggtcagtgcctacaataagacagtgaccccttgtcagcaaactgtgactctgtgtaaaggggagatgaccttgacaggaggttactgttctcactaccagctgacactgctgaagataagatgcacaatggctagtcagactgtagggaccagtttcaaggggtgcaaacctgtgattttggggttgtttaacatgaaacactttagtgtagtaattgtatccactgtttgcatttcaactgccacatttgtcacatttttatggaatctgttagtggattcatctttttgttaatccatgtgtttattatatgtgactatttttgtaaacgaagtttctgttgagaaataggctaaggacctctataacaggtatgccacctggggggtatggcaaccacatggccctcccagctacacaaagtcgtggtttgcatgagggcatgctgcacttagagatcatgcatgagaaaaagtcacaagaaaaacaaattcttaaatttcaccatatttctgggaggggtaattgggtgataagtggaggtgctttgttgatcttgttttgcgaaatccagcccctagaccaagtagattatttgtgggtaggccagtaaatcttagcaggtgcaaacttcattcaaatgtttggagtcataaatgttatgtttctttttgttgtattaaaaaaaaaacctgaatagtgaatattgcccctcaccctccaccgccagaagactgaattgaccaaaattactctttataaatttctgctttttcctgcactttgtttagccatctttgggctctcagcaaggttgacactgtatatgttaatgaaatgctatttattatgtaaatagtcattttaccctgtggtgcacgtttgagcaaacaaataatgacctaagcacagtatttattgcatcaaatatgtaccacaagaaatgtagagtgcaagctttacacaggtaataaaatgtattctgtaccatttatagatagtttggatgctatcaatgcatgtttatattaccatgctgctgtatctggtttctctcactgctcagaatctcatttatgagaaaccatatgtcagtggtaaagtcaaggaaattgttcaacagatctcatttatttaagtcattaagcaatagtttgcagcactttaacagctttttggttatttttacattttaagtggataacatatggtatatagccagactgtacagacatgtttaaaaaaacacactgcttaacctattaaatatgtgtttagaattttataagcaaatataaatactgtaaaaagtcactttattttatttttcagcattatgtacataaatatgaagaggaaattatcttcaggttgatatcacaatcacttttcttactttctgtccatagtactttttcatgaaagaaatttgctaaataagacatgaaaacaagactgggtagttgtagatttctgctttttaaattacatttgctaattttagattatttcacaattttaaggagcaaaataggttcacgattcatatccaaattatgctttgcaattggaaaagggtttaaaattttatttatatttctggtagtacctgtactaactgaattgaaggtagtgcttatgttatttttgttctttttttctgacttcggtttatgttttcatttctttggagtaatgctgctctagattgttctaaatagaatgtgggcttcataatttttttttccacaaaaacagagtagtcaacttatatagtcaattacatcaggacattttgtgtttcttacagaagcaaaccataggctcctcttttccttaaaactacttagataaactgtattcgtgaactgcatgctggaaaatgctactattatgctaaataatgctaaccaacatttaaaatgtgcaaaactaataaagattacattttttatttt

SEQ ID NO: 5 - DNA, 8381 bp, Homo sapiens
atactgcagaggtctctggtgcatgtgtgtatgtgtgcgtttgtgtgtgtttgtgtgtctgtgtgttctgccccagtgagactgcagcccttgtaaatactttgacaccttttgcaagaaggaatctgaacaattgcaactgaaggcacattgttatcatctcgtctttgggtgatgctgttcctcactgcagatggataattttccttttaatcaggaatttcatatgcagaataaatggtaattaaaatgtgcaggatgacaagatggagcaaacagtgcttgtaccaccaggacctgacagcttcaacttcttcaccagagaatctcttgcggctattgaaagacgcattgcagaagaaaaggcaaagaatcccaaaccagacaaaaaagatgacgacgaaaatggcccaaagccaaatagtgacttggaagctggaaagaaccttccatttatttatggagacattcctccagagatggtgtcagagcccctggaggacctggacccctactatatcaataagaaaacttttatagtattgaataaattgaaggccatcttccggttcagtgccacctctgccctgtacattttaactcccttcaatcctcttaggaaaatagctattaagattttggtacattcattattcagcatgctaattatgtgcactattttgacaaactgtgtgtttatgacaatgagtaaccctcctgattggacaaagaatgtagaatacaccttcacaggaatatatacttttgaatcacttataaaaattattgcaaggggattctgtttagaagattttactttccttcgggatccatggaactggctcgatttcactgtcattacatttgcgtacgtcacagagtttgtggacctgggcaatgtctcggcattgagaacattcagagttctccgagcattgaagatgatttcagtcattccaggcctgaaaaccattgtgggagccctgatccagtctgtgaagaagctctcagatgtaatgatcctgactgtgttctgtctgagcgtatttgctctaattgggctgcagctgttcatgggcaacctgaggaataaatgtatacaatggcctcccaccaatgcttccttggaggaacatagtatagaaaagaatataactgtgaattataatggtacacttataaatgaaactgtctttgagtttgactggaagtcatatattcaagattcaagatatcattatttcctggagggttttttagatgcactactatgtggaaatagctctgatgcaggccaatgtccagagggatatatgtgtgtgaaagctggtagaaatcccaattatggctacacaagctttgataccttcagttgggcttttttgtccttgtttcgactaatgactcaggacttctgggaaaatctttatcaactgacattacgtgctgctgggaaaacgtacatgatattttttgtattggtcattttcttgggctcattctacctaataaatttgatcctggctgtggtggccatggcctacgaggaacagaatcaggccaccttggaagaagcagaacagaaagaggccgaatttcagcagatgattgaacagcttaaaaagcaacaggaggcagctcagcaggcagcaacggcaactgcctcagaacattccagagagcccagtgcagcaggcaggctctcagacagctcatctgaagcctctaagttgagttccaagagtgctaaggaaagaagaaatcggaggaagaaaagaaaacagaaagagcagtctggtggggaagagaaagatgaggatgaattccaaaaatctgaatctgaggacagcatcaggaggaaaggttttcgcttctccattgaagggaaccgattgacatatgaaaagaggtactcctccccacaccagtctttgttgagcatccgtggctccctattttcaccaaggcgaaatagcagaacaagccttttcagctttagagggcgagcaaaggatgtgggatctgagaacgacttcgcagatgatgagcacagcacctttgaggataacgagagccgtagagattccttgtttgtgccccgacgacacggagagagacgcaacagcaacctgagtcagaccagtaggtcatcccggatgctggcagtgtttccagcgaatgggaagatgcacagcactgtggattgcaatggtgtggtttccttggttggtggaccttcagttcctacatcgcctgttggacagcttctgccagaggtgataatagataagccagctactgatgacaatggaacaaccactgaaactgaaatgagaaagagaaggtcaagttctttccacgtttccatggactttctagaagatccttcccaaaggcaacgagcaatgagtatagccagcattctaacaaatacagtagaagaacttgaagaatccaggcagaaatgcccaccctgttggtataaattttccaacatattcttaatctgggactgttctccatattggttaaaagtgaaacatgttgtcaacctggttgtgatggacccatttgttgacctggccatcaccatctgtattgtcttaaatactcttttcatggccatggagcactatccaatgacggaccatttcaataatgtgcttacagtaggaaacttggttttcactgggatctttacagcagaaatgtttctgaaaattattgccatggatccttactattatttccaagaaggctggaatatctttgacggttttattgtgacgcttagcctggtagaacttggactcgccaatgtggaaggattatctgttctccgttcatttcgattgctgcgagttttcaagttggcaaaatcttggccaacgttaaatatgctaataaagatcatcggcaattccgtgggggctctgggaaatttaaccctcgtcttggccatcatcgtcttcatttttgccgtggtcggcatgcagctctttggtaaaagctacaaagattgtgtctgcaagatcgccagtgattgtcaactcccacgctggcacatgaatgacttcttccactccttcctgattgtgttccgcgtgctgtgtggggagtggatagagaccatgtgggactgtatggaggttgctggtcaagccatgtgccttactgtcttcatgatggtcatggtgattggaaacctagtggtcctgaatctctttctggccttgcttctgagctcatttagtgcagacaaccttgcagccactgatgatgataatgaaatgaataatctccaaattgctgtggataggatgcacaaaggagtagcttatgtgaaaagaaaaatatatgaatttattcaacagtccttcattaggaaacaaaagattttagatgaaattaaaccacttgatgatctaaacaacaagaaagacagttgtatgtccaatcatacaacagaaattgggaaagatcttgactatcttaaagatgtaaatggaactacaagtggtataggaactggcagcagtgttgaaaaatacattattgatgaaagtgattacatgtcattcataaacaaccccagtcttactgtgactgtaccaattgctgtaggagaatctgactttgaaaatttaaacacggaagactttagtagtgaatcggatctggaagaaagcaaagagaaactgaatgaaagcagtagctcatcagaaggtagcactgtggacatcggcgcacctgtagaagaacagcccgtagtggaacctgaagaaactcttgaaccagaagcttgtttcactgaaggctgtgtacaaagattcaagtgttgtcaaatcaatgtggaagaaggcagaggaaaacaatggtggaacctgagaaggacgtgtttccgaatagttgaacataactggtttgagaccttcattgttttcatgattctccttagtagtggtgctctggcatttgaagatatatatattgatcagcgaaagacgattaagacgatgttggaatatgctgacaaggttttcacttacattttcattctggaaatgcttctaaaatgggtggcatatggctatcaaacatatttcaccaatgcctggtgttggctggacttcttaattgttgatgtttcattggtcagtttaacagcaaatgccttgggttactcagaacttggagccatcaaatctctcaggacactaagagctctgagacctctaagagccttatctcgatttgaagggatgagggtggttgtgaatgcccttttaggagcaattccatccatcatgaatgtgcttctggtttgtcttatattctggctaattttcagcatcatgggcgtaaatttgtttgctggcaaattctaccactgtattaacaccacaactggtgacaggtttgacatcgaagacgtgaataatcatactgattgcctaaaactaatagaaagaaatgagactgctcgatggaaaaatgtgaaagtaaactttgataatgtaggatttgggtatctctctttgcttcaagttgccacattcaaaggatggatggatataatgtatgcagcagttgattccagaaatgtggaactccagcctaagtatgaaaaaagtctgtacatgtatctttactttgttattttcatcatctttgggtccttcttcaccttgaacctgtttattggtgtcatcatagataatttcaaccagcagaaaaagaagtttggaggtcaagacatctttatgacagaagaacagaagaaatactataatgcaatgaaaaaattaggatcgaaaaaaccgcaaaagcctatacctcgaccaggaaacaaatttcaaggaatggtctttgacttcgtaaccagacaagtttttgacataagcatcatgattctcatctgtcttaacatggtcacaatgatggtggaaacagatgaccagagtgaatatgtgactaccattttgtcacgcatcaatctggtgttcattgtgctatttactggagagtgtgtactgaaactcatctctctacgccattattattttaccattggatggaatatttttgattttgtggttgtcattctctccattgtaggtatgtttcttgccgagctgatagaaaagtatttcgtgtcccctaccctgttccgagtgatccgtcttgctaggattggccgaatcctacgtctgatcaaaggagcaaaggggatccgcacgctgctctttgctttgatgatgtcccttcctgcgttgtttaacatcggcctcctactcttcctagtcatgttcatctacgccatctttgggatgtccaactttgcctatgttaagagggaagttgggatcgatgacatgttcaactttgagacctttggcaacagcatgatctgcctattccaaattacaacctctgctggctgggatggattgctagcacccattctcaacagtaagccacccgactgtgaccctaataaagttaaccctggaagctcagttaagggagactgtgggaacccatctgttggaattttcttttttgtcagttacatcatcatatccttcctggttgtggtgaacatgtacatcgcggtcatcctggagaacttcagtgttgctactgaagaaagtgcagagcctctgagtgaggatgactttgagatgttctatgaggtttgggagaagtttgatcccgatgcaactcagttcatggaatttgaaaaattatctcagtttgcagctgcgcttgaaccgcctctcaatctgccacaaccaaacaaactccagctcattgccatggatttgcccatggtgagtggtgaccggatccactgtcttgatatcttatttgcttttacaaagcgggttctaggagagagtggagagatggatgctctacgaatacagatggaagagcgattcatggcttccaatccttccaaggtctcctatcagccaatcactactactttaaaacgaaaacaagaggaagtatctgctgtcattattcagcgtgcttacagacgccaccttttaaagcgaactgtaaaacaagcttcctttacgtacaataaaaacaaaatcaaaggtggggctaatcttcttataaaagaagacatgataattgacagaataaatgaaaactctattacagaaaaaactgatctgaccatgtccactgcagcttgtccaccttcctatgaccgggtgacaaagccaattgtggaaaaacatgagcaagaaggcaaagatgaaaaagccaaagggaaataaatgaaaataaataaaaataattgggtgacaaattgtttacagcctgtgaaggtgatgtatttttatcaacaggactcctttaggaggtcaatgccaaactgactgtttttacacaaatctccttaaggtcagtgcctacaataagacagtgaccccttgtcagcaaactgtgactctgtgtaaaggggagatgaccttgacaggaggttactgttctcactaccagctgacactgctgaagataagatgcacaatggctagtcagactgtagggaccagtttcaaggggtgcaaacctgtgattttggggttgtttaacatgaaacactttagtgtagtaattgtatccactgtttgcatttcaactgccacatttgtcacatttttatggaatctgttagtggattcatctttttgttaatccatgtgtttattatatgtgactatttttgtaaacgaagtttctgttgagaaataggctaaggacctctataacaggtatgccacctggggggtatggcaaccacatggccctcccagctacacaaagtcgtggtttgcatgagggcatgctgcacttagagatcatgcatgagaaaaagtcacaagaaaaacaaattcttaaatttcaccatatttctgggaggggtaattgggtgataagtggaggtgctttgttgatcttgttttgcgaaatccagcccctagaccaagtagattatttgtgggtaggccagtaaatcttagcaggtgcaaacttcattcaaatgtttggagtcataaatgttatgtttctttttgttgtattaaaaaaaaaacctgaatagtgaatattgcccctcaccctccaccgccagaagactgaattgaccaaaattactctttataaatttctgctttttcctgcactttgtttagccatctttgggctctcagcaaggttgacactgtatatgttaatgaaatgctatttattatgtaaatagtcattttaccctgtggtgcacgtttgagcaaacaaataatgacctaagcacagtatttattgcatcaaatatgtaccacaagaaatgtagagtgcaagctttacacaggtaataaaatgtattctgtaccatttatagatagtttggatgctatcaatgcatgtttatattaccatgctgctgtatctggtttctctcactgctcagaatctcatttatgagaaaccatatgtcagtggtaaagtcaaggaaattgttcaacagatctcatttatttaagtcattaagcaatagtttgcagcactttaacagctttttggttatttttacattttaagtggataacatatggtatatagccagactgtacagacatgtttaaaaaaacacactgcttaacctattaaatatgtgtttagaattttataagcaaatataaatactgtaaaaagtcactttattttatttttcagcattatgtacataaatatgaagaggaaattatcttcaggttgatatcacaatcacttttcttactttctgtccatagtactttttcatgaaagaaatttgctaaataagacatgaaaacaagactgggtagttgtagatttctgctttttaaattacatttgctaattttagattatttcacaattttaaggagcaaaataggttcacgattcatatccaaattatgctttgcaattggaaaagggtttaaaattttatttatatttctggtagtacctgtactaactgaattgaaggtagtgcttatgttatttttgttctttttttctgacttcggtttatgttttcatttctttggagtaatgctgctctagattgttctaaatagaatgtgggcttcataatttttttttccacaaaaacagagtagtcaacttatatagtcaattacatcaggacattttgtgtttcttacagaagcaaaccataggctcctcttttccttaaaactacttagataaactgtattcgtgaactgcatgctggaaaatgctactattatgctaaataatgctaaccaacatttaaaatgtgcaaaactaataaagattacattttttatttt

SEQ ID NO: 6 - DNA, 8381 bp, Homo sapiens
atactgcagaggtctctggtgcatgtgtgtatgtgtgcgtttgtgtgtgtttgtgtgtctgtgtgttctgccccagtgagactgcagcccttgtaaatactttgacaccttttgcaagaaggaatctgaacaattgcaactgaaggcacattgttatcatctcgtctttgggtgatgctgttcctcactgcagatggataattttccttttaatcaggaatttcatatgcagaataaatggtaattaaaatgtgcaggatgacaagatggagcaaacagtgcttgtaccaccaggacctgacagcttcaacttcttcaccagagaatctcttgcggctattgaaagacgcattgcagaagaaaaggcaaagaatcccaaaccagacaaaaaagatgacgacgaaaatggcccaaagccaaatagtgacttggaagctggaaagaaccttccatttatttatggagacattcctccagagatggtgtcagagcccctggaggacctggacccctactatatcaataagaaaacttttatagtattgaataaattgaaggccatcttccggttcagtgccacctctgccctgtacattttaactcccttcaatcctcttaggaaaatagctattaagattttggtacattcattattcagcatgctaattatgtgcactattttgacaaactgtgtgtttatgacaatgagtaaccctcctgattggacaaagaatgtagaatacaccttcacaggaatatatacttttgaatcacttataaaaattattgcaaggggattctgtttagaagattttactttccttcgggatccatggaactggctcgatttcactgtcattacatttgcgtacgtcacagagtttgtggacctgggcaatgtctcggcattgagaacattcagagttctccgagcattgaagacgatttcagtcattccaggcctgaaaaccattgtgggaaccctgatccagtctgtgaagaagctctcagatgtaatgatcctgactgtgttctgtctgagcgtatttgctctaattgggctgcagctgttcatgggcaacctgaggaataaatgtatacaatggcctcccaccaatgcttccttggaggaacatagtatagaaaagaatataactgtgaattataatggtacacttataaatgaaactgtctttgagtttgactggaagtcatatattcaagattcaagatatcattatttcctggagggttttttagatgcactactatgtggaaatagctctgatgcaggccaatgtccagagggatatatgtgtgtgaaagctggtagaaatcccaattatggctacacaagctttgataccttcagttgggcttttttgtccttgtttcgactaatgactcaggacttctgggaaaatctttatcaactgacattacgtgctgctgggaaaacgtacatgatattttttgtattggtcattttcttgggctcattctacctaataaatttgatcctggctgtggtggccatggcctacgaggaacagaatcaggccaccttggaagaagcagaacagaaagaggccgaatttcagcagatgattgaacagcttaaaaagcaacaggaggcagctcagcaggcagcaacggcaactgcctcagaacattccagagagcccagtgcagcaggcaggctctcagacagctcatctgaagcctctaagttgagttccaagagtgctaaggaaagaagaaatcggaggaagaaaagaaaacagaaagagcagtctggtggggaagagaaagatgaggatgaattccaaaaatctgaatctgaggacagcatcaggaggaaaggttttcgcttctccattgaagggaaccgattgacatatgaaaagaggtactcctccccacaccagtctttgttgagcatccgtggctccctattttcaccaaggcgaaatagcagaacaagccttttcagctttagagggcgagcaaaggatgtgggatctgagaacgacttcgcagatgatgagcacagcacctttgaggataacgagagccgtagagattccttgtttgtgccccgacgacacggagagagacgcaacagcaacctgagtcagaccagtaggtcatcccggatgctggcagtgtttccagcgaatgggaagatgcacagcactgtggattgcaatggtgtggtttccttggttggtggaccttcagttcctacatcgcctgttggacagcttctgccagaggtgataatagataagccagctactgatgacaatggaacaaccactgaaactgaaatgagaaagagaaggtcaagttctttccacgtttccatggactttctagaagatccttcccaaaggcaacgagcaatgagtatagccagcattctaacaaatacagtagaagaacttgaagaatccaggcagaaatgcccaccctgttggtataaattttccaacatattcttaatctgggactgttctccatattggttaaaagtgaaacatgttgtcaacctggttgtgatggacccatttgttgacctggccatcaccatctgtattgtcttaaatactcttttcatggccatggagcactatccaatgacggaccatttcaataatgtgcttacagtaggaaacttggttttcactgggatctttacagcagaaatgtttctgaaaattattgccatggatccttactattatttccaagaaggctggaatatctttgacggttttattgtgacgcttagcctggtagaacttggactcgccaatgtggaaggattatctgttctccgttcatttcgattgctgcgagttttcaagttggcaaaatcttggccaacgttaaatatgctaataaagatcatcggcaattccgtgggggctctgggaaatttaaccctcgtcttggccatcatcgtcttcatttttgccgtggtcggcatgcagctctttggtaaaagctacaaagattgtgtctgcaagatcgccagtgattgtcaactcccacgctggcacatgaatgacttcttccactccttcctgattgtgttccgcgtgctgtgtggggagtggatagagaccatgtgggactgtatggaggttgctggtcaagccatgtgccttactgtcttcatgatggtcatggtgattggaaacctagtggtcctgaatctctttctggccttgcttctgagctcatttagtgcagacaaccttgcagccactgatgatgataatgaaatgaataatctccaaattgctgtggataggatgcacaaaggagtagcttatgtgaaaagaaaaatatatgaatttattcaacagtccttcattaggaaacaaaagattttagatgaaattaaaccacttgatgatctaaacaacaagaaagacagttgtatgtccaatcatacaacagaaattgggaaagatcttgactatcttaaagatgtaaatggaactacaagtggtataggaactggcagcagtgttgaaaaatacattattgatgaaagtgattacatgtcattcataaacaaccccagtcttactgtgactgtaccaattgctgtaggagaatctgactttgaaaatttaaacacggaagactttagtagtgaatcggatctggaagaaagcaaagagaaactgaatgaaagcagtagctcatcagaaggtagcactgtggacatcggcgcacctgtagaagaacagcccgtagtggaacctgaagaaactcttgaaccagaagcttgtttcactgaaggctgtgtacaaagattcaagtgttgtcaaatcaatgtggaagaaggcagaggaaaacaatggtggaacctgagaaggacgtgtttccgaatagttgaacataactggtttgagaccttcattgttttcatgattctccttagtagtggtgctctggcatttgaagatatatatattgatcagcgaaagacgattaagacgatgttggaatatgctgacaaggttttcacttacattttcattctggaaatgcttctaaaatgggtggcatatggctatcaaacatatttcaccaatgcctggtgttggctggacttcttaattgttgatgtttcattggtcagtttaacagcaaatgccttgggttactcagaacttggagccatcaaatctctcaggacactaagagctctgagacctctaagagccttatctcgatttgaagggatgagggtggttgtgaatgcccttttaggagcaattccatccatcatgaatgtgcttctggtttgtcttatattctggctaattttcagcatcatgggcgtaaatttgtttgctggcaaattctaccactgtattaacaccacaactggtgacaggtttgacatcgaagacgtgaataatcatactgattgcctaaaactaatagaaagaaatgagactgctcgatggaaaaatgtgaaagtaaactttgataatgtaggatttgggtatctctctttgcttcaagttgccacattcaaaggatggatggatataatgtatgcagcagttgattccagaaatgtggaactccagcctaagtatgaaaaaagtctgtacatgtatctttactttgttattttcatcatctttgggtccttcttcaccttgaacctgtttattggtgtcatcatagataatttcaaccagcagaaaaagaagtttggaggtcaagacatctttatgacagaagaacagaagaaatactataatgcaatgaaaaaattaggatcgaaaaaaccgcaaaagcctatacctcgaccaggaaacaaatttcaaggaatggtctttgacttcgtaaccagacaagtttttgacataagcatcatgattctcatctgtcttaacatggtcacaatgatggtggaaacagatgaccagagtgaatatgtgactaccattttgtcacgcatcaatctggtgttcattgtgctatttactggagagtgtgtactgaaactcatctctctacgccattattattttaccattggatggaatatttttgattttgtggttgtcattctctccattgtaggtatgtttcttgccgagctgatagaaaagtatttcgtgtcccctaccctgttccgagtgatccgtcttgctaggattggccgaatcctacgtctgatcaaaggagcaaaggggatccgcacgctgctctttgctttgatgatgtcccttcctgcgttgtttaacatcggcctcctactcttcctagtcatgttcatctacgccatctttgggatgtccaactttgcctatgttaagagggaagttgggatcgatgacatgttcaactttgagacctttggcaacagcatgatctgcctattccaaattacaacctctgctggctgggatggattgctagcacccattctcaacagtaagccacccgactgtgaccctaataaagttaaccctggaagctcagttaagggagactgtgggaacccatctgttggaattttcttttttgtcagttacatcatcatatccttcctggttgtggtgaacatgtacatcgcggtcatcctggagaacttcagtgttgctactgaagaaagtgcagagcctctgagtgaggatgactttgagatgttctatgaggtttgggagaagtttgatcccgatgcaactcagttcatggaatttgaaaaattatctcagtttgcagctgcgcttgaaccgcctctcaatctgccacaaccaaacaaactccagctcattgccatggatttgcccatggtgagtggtgaccggatccactgtcttgatatcttatttgcttttacaaagcgggttctaggagagagtggagagatggatgctctacgaatacagatggaagagcgattcatggcttccaatccttccaaggtctcctatcagccaatcactactactttaaaacgaaaacaagaggaagtatctgctgtcattattcagcgtgcttacagacgccaccttttaaagcgaactgtaaaacaagcttcctttacgtacaataaaaacaaaatcaaaggtggggctaatcttcttataaaagaagacatgataattgacagaataaatgaaaactctattacagaaaaaactgatctgaccatgtccactgcagcttgtccaccttcctatgaccgggtgacaaagccaattgtggaaaaacatgagcaagaaggcaaagatgaaaaagccaaagggaaataaatgaaaataaataaaaataattgggtgacaaattgtttacagcctgtgaaggtgatgtatttttatcaacaggactcctttaggaggtcaatgccaaactgactgtttttacacaaatctccttaaggtcagtgcctacaataagacagtgaccccttgtcagcaaactgtgactctgtgtaaaggggagatgaccttgacaggaggttactgttctcactaccagctgacactgctgaagataagatgcacaatggctagtcagactgtagggaccagtttcaaggggtgcaaacctgtgattttggggttgtttaacatgaaacactttagtgtagtaattgtatccactgtttgcatttcaactgccacatttgtcacatttttatggaatctgttagtggattcatctttttgttaatccatgtgtttattatatgtgactatttttgtaaacgaagtttctgttgagaaataggctaaggacctctataacaggtatgccacctggggggtatggcaaccacatggccctcccagctacacaaagtcgtggtttgcatgagggcatgctgcacttagagatcatgcatgagaaaaagtcacaagaaaaacaaattcttaaatttcaccatatttctgggaggggtaattgggtgataagtggaggtgctttgttgatcttgttttgcgaaatccagcccctagaccaagtagattatttgtgggtaggccagtaaatcttagcaggtgcaaacttcattcaaatgtttggagtcataaatgttatgtttctttttgttgtattaaaaaaaaaacctgaatagtgaatattgcccctcaccctccaccgccagaagactgaattgaccaaaattactctttataaatttctgctttttcctgcactttgtttagccatctttgggctctcagcaaggttgacactgtatatgttaatgaaatgctatttattatgtaaatagtcattttaccctgtggtgcacgtttgagcaaacaaataatgacctaagcacagtatttattgcatcaaatatgtaccacaagaaatgtagagtgcaagctttacacaggtaataaaatgtattctgtaccatttatagatagtttggatgctatcaatgcatgtttatattaccatgctgctgtatctggtttctctcactgctcagaatctcatttatgagaaaccatatgtcagtggtaaagtcaaggaaattgttcaacagatctcatttatttaagtcattaagcaatagtttgcagcactttaacagctttttggttatttttacattttaagtggataacatatggtatatagccagactgtacagacatgtttaaaaaaacacactgcttaacctattaaatatgtgtttagaattttataagcaaatataaatactgtaaaaagtcactttattttatttttcagcattatgtacataaatatgaagaggaaattatcttcaggttgatatcacaatcacttttcttactttctgtccatagtactttttcatgaaagaaatttgctaaataagacatgaaaacaagactgggtagttgtagatttctgctttttaaattacatttgctaattttagattatttcacaattttaaggagcaaaataggttcacgattcatatccaaattatgctttgcaattggaaaagggtttaaaattttatttatatttctggtagtacctgtactaactgaattgaaggtagtgcttatgttatttttgttctttttttctgacttcggtttatgttttcatttctttggagtaatgctgctctagattgttctaaatagaatgtgggcttcataatttttttttccacaaaaacagagtagtcaacttatatagtcaattacatcaggacattttgtgtttcttacagaagcaaaccataggctcctcttttccttaaaactacttagataaactgtattcgtgaactgcatgctggaaaatgctactattatgctaaataatgctaaccaacatttaaaatgtgcaaaactaataaagattacattttttatttt

SEQ ID NO: 7 - DNA, 8381 bp, Homo sapiens
atactgcagaggtctctggtgcatgtgtgtatgtgtgcgtttgtgtgtgtttgtgtgtctgtgtgttctgccccagtgagactgcagcccttgtaaatactttgacaccttttgcaagaaggaatctgaacaattgcaactgaaggcacattgttatcatctcgtctttgggtgatgctgttcctcactgcagatggataattttccttttaatcaggaatttcatatgcagaataaatggtaattaaaatgtgcaggatgacaagatggagcaaacagtgcttgtaccaccaggacctgacagcttcaacttcttcaccagagaatctcttgcggctattgaaagacgcattgcagaagaaaaggcaaagaatcccaaaccagacaaaaaagatgacgacgaaaatggcccaaagccaaatagtgacttggaagctggaaagaaccttccatttatttatggagacattcctccagagatggtgtcagagcccctggaggacctggacccctactatatcaataagaaaacttttatagtattgaataaattgaaggccatcttccggttcagtgccacctctgccctgtacattttaactcccttcaatcctcttaggaaaatagctattaagattttggtacattcattattcagcatgctaattatgtgcactattttgacaaactgtgtgtttatgacaatgagtaaccctcctgattggacaaagaatgtagaatacaccttcacaggaatatatacttttgaatcacttataaaaattattgcaaggggattctgtttagaagattttactttccttcgggatccatggaactggctcgatttcactgtcattacatttgcgtacgtcacagagtttgtggacctgggcaatgtctcggcattgagaacattcagagttctccgagcattgaagacgatttcagtcattccaggcctgaaaaccattgtgggagccctgatccagtctgtgaagaagctctcagatgtaatgatcctgactgtgttctgtctgagcgtatttgctctaattgggctgcagctgttcatgggcaacctgaggaataaatgtatacaatggcctcccaccaatgcttccttggaggaacatagtatagaaaagaatataactgtgaattataatggtacacttataaatgaaactgtctttgagtttgactggaagtcatatattcaagattcaagatatcattatttcctggagggttttttagatgcactactatgtggaaatagctctgatgcaggccaatgtccagagggatatatgtgtgtgaaagctggtagaaatcccaattatggctacacaagctttgataccttcagttgggcttttttgtccttgtttcgactaatgactcaggacttctgggaaaatctttatcaactgacattacgtgctgctgggaaaacgtacatgatattttttgtattggtcattttcttgggctcattctacctaataaatttgatcctggctgtggtggccatggcctacgaggaacagaatcaggccaccttggaagaagcagaacagaaagaggccgaatttcagcagatgattgaacagcttaaaaagcaacaggaggcagctcagcaggcagcaacggcaactgcctcagaacattccagagagcccagtgcagcaggcaggctctcagacagctcatctgaagcctctaagttgagttccaagagtgctaaggaaagaagaaatcggaggaagaaaagaaaacagaaagagcagtctggtggggaagagaaagatgaggatgaattccaaaaatctgaatctgaggacagcatcaggaggaaaggttttcgcttctccattgaagggaaccgattgacatatgaaaagaggtactcctccccacaccagtctttgttgagcatccgtggctccctattttcaccaaggcgaaatagcagaacaagccttttcagctttagagggcgagcaaaggatgtgggatctgagaacgacttcgcagatgatgagcacagcacctttgaggataacgagagccgtagagattccttgtttgtgccccgacgacacggagagagacgcaacagcaacctgagtcagaccagtaggtcatcccggatgctggcagtgtttccagcgaatgggaagatgcacagcactgtggattgcaatggtgtggtttccttggttggtggaccttcagttcctacatcgcctgttggacagcttctgccagaggtgataatagataagccagctactgatgacaatggaacaaccactgaaactgaaatgagaaagagaaggtcaagttctttccacgtttccatggactttctagaagatccttcccaaaggcaacgagcaatgagtatagccagcattctaacaaatacagtagaagaacttgaagaatccaggcagaaatgcccaccctgttggtataaattttccaacatattcttaatctgggactgttctccatattggttaaaagtgaaacatgttgtcaacctggttgtgatggacccatttgttgacctggccatcaccatctgtattgtcttaaatactcttttcatggccatggagcactatccaatgacggaccatttcaataatgtgcttacagtaggaaacttggttttcactgggatctttacagcagaaatgtttctgaaaattattgccatggatccttactattatttccaagaaggctggaatatctttgacggttttattgtgacgcttagcctggtagaacttggactcgccaatgtggaaggattatctgttctccgttcatttcgattgctgcgagttttcaagttggcaaaatcttggccaacgttaaatatgctaataaagatcatcggcaattccgtgggggctctgggaaatttaaccctcgtcttggccatcatcgtcttcatttttgccgtggtcggcatgcagctctttggtaaaagctacaaagattgtgtctgcaagatcgccagtgattgtcaactcccacgctggcacatgaatgacttcttccactccttcctgattgtgttccacgtgctgtgtggggagtggatagagaccatgtgggactgtatggaggttgctggtcaagccatgtgccttactgtcttcatgatggtcatggtgattggaaacctagtggtcctgaatctctttctggccttgcttctgagctcatttagtgcagacaaccttgcagccactgatgatgataatgaaatgaataatctccaaattgctgtggataggatgcacaaaggagtagcttatgtgaaaagaaaaatatatgaatttattcaacagtccttcattaggaaacaaaagattttagatgaaattaaaccacttgatgatctaaacaacaagaaagacagttgtatgtccaatcatacaacagaaattgggaaagatcttgactatcttaaagatgtaaatggaactacaagtggtataggaactggcagcagtgttgaaaaatacattattgatgaaagtgattacatgtcattcataaacaaccccagtcttactgtgactgtaccaattgctgtaggagaatctgactttgaaaatttaaacacggaagactttagtagtgaatcggatctggaagaaagcaaagagaaactgaatgaaagcagtagctcatcagaaggtagcactgtggacatcggcgcacctgtagaagaacagcccgtagtggaacctgaagaaactcttgaaccagaagcttgtttcactgaaggctgtgtacaaagattcaagtgttgtcaaatcaatgtggaagaaggcagaggaaaacaatggtggaacctgagaaggacgtgtttccgaatagttgaacataactggtttgagaccttcattgttttcatgattctccttagtagtggtgctctggcatttgaagatatatatattgatcagcgaaagacgattaagacgatgttggaatatgctgacaaggttttcacttacattttcattctggaaatgcttctaaaatgggtggcatatggctatcaaacatatttcaccaatgcctggtgttggctggacttcttaattgttgatgtttcattggtcagtttaacagcaaatgccttgggttactcagaacttggagccatcaaatctctcaggacactaagagctctgagacctctaagagccttatctcgatttgaagggatgagggtggttgtgaatgcccttttaggagcaattccatccatcatgaatgtgcttctggtttgtcttatattctggctaattttcagcatcatgggcgtaaatttgtttgctggcaaattctaccactgtattaacaccacaactggtgacaggtttgacatcgaagacgtgaataatcatactgattgcctaaaactaatagaaagaaatgagactgctcgatggaaaaatgtgaaagtaaactttgataatgtaggatttgggtatctctctttgcttcaagttgccacattcaaaggatggatggatataatgtatgcagcagttgattccagaaatgtggaactccagcctaagtatgaaaaaagtctgtacatgtatctttactttgttattttcatcatctttgggtccttcttcaccttgaacctgtttattggtgtcatcatagataatttcaaccagcagaaaaagaagtttggaggtcaagacatctttatgacagaagaacagaagaaatactataatgcaatgaaaaaattaggatcgaaaaaaccgcaaaagcctatacctcgaccaggaaacaaatttcaaggaatggtctttgacttcgtaaccagacaagtttttgacataagcatcatgattctcatctgtcttaacatggtcacaatgatggtggaaacagatgaccagagtgaatatgtgactaccattttgtcacgcatcaatctggtgttcattgtgctatttactggagagtgtgtactgaaactcatctctctacgccattattattttaccattggatggaatatttttgattttgtggttgtcattctctccattgtaggtatgtttcttgccgagctgatagaaaagtatttcgtgtcccctaccctgttccgagtgatccgtcttgctaggattggccgaatcctacgtctgatcaaaggagcaaaggggatccgcacgctgctctttgctttgatgatgtcccttcctgcgttgtttaacatcggcctcctactcttcctagtcatgttcatctacgccatctttgggatgtccaactttgcctatgttaagagggaagttgggatcgatgacatgttcaactttgagacctttggcaacagcatgatctgcctattccaaattacaacctctgctggctgggatggattgctagcacccattctcaacagtaagccacccgactgtgaccctaataaagttaaccctggaagctcagttaagggagactgtgggaacccatctgttggaattttcttttttgtcagttacatcatcatatccttcctggttgtggtgaacatgtacatcgcggtcatcctggagaacttcagtgttgctactgaagaaagtgcagagcctctgagtgaggatgactttgagatgttctatgaggtttgggagaagtttgatcccgatgcaactcagttcatggaatttgaaaaattatctcagtttgcagctgcgcttgaaccgcctctcaatctgccacaaccaaacaaactccagctcattgccatggatttgcccatggtgagtggtgaccggatccactgtcttgatatcttatttgcttttacaaagcgggttctaggagagagtggagagatggatgctctacgaatacagatggaagagcgattcatggcttccaatccttccaaggtctcctatcagccaatcactactactttaaaacgaaaacaagaggaagtatctgctgtcattattcagcgtgcttacagacgccaccttttaaagcgaactgtaaaacaagcttcctttacgtacaataaaaacaaaatcaaaggtggggctaatcttcttataaaagaagacatgataattgacagaataaatgaaaactctattacagaaaaaactgatctgaccatgtccactgcagcttgtccaccttcctatgaccgggtgacaaagccaattgtggaaaaacatgagcaagaaggcaaagatgaaaaagccaaagggaaataaatgaaaataaataaaaataattgggtgacaaattgtttacagcctgtgaaggtgatgtatttttatcaacaggactcctttaggaggtcaatgccaaactgactgtttttacacaaatctccttaaggtcagtgcctacaataagacagtgaccccttgtcagcaaactgtgactctgtgtaaaggggagatgaccttgacaggaggttactgttctcactaccagctgacactgctgaagataagatgcacaatggctagtcagactgtagggaccagtttcaaggggtgcaaacctgtgattttggggttgtttaacatgaaacactttagtgtagtaattgtatccactgtttgcatttcaactgccacatttgtcacatttttatggaatctgttagtggattcatctttttgttaatccatgtgtttattatatgtgactatttttgtaaacgaagtttctgttgagaaataggctaaggacctctataacaggtatgccacctggggggtatggcaaccacatggccctcccagctacacaaagtcgtggtttgcatgagggcatgctgcacttagagatcatgcatgagaaaaagtcacaagaaaaacaaattcttaaatttcaccatatttctgggaggggtaattgggtgataagtggaggtgctttgttgatcttgttttgcgaaatccagcccctagaccaagtagattatttgtgggtaggccagtaaatcttagcaggtgcaaacttcattcaaatgtttggagtcataaatgttatgtttctttttgttgtattaaaaaaaaaacctgaatagtgaatattgcccctcaccctccaccgccagaagactgaattgaccaaaattactctttataaatttctgctttttcctgcactttgtttagccatctttgggctctcagcaaggttgacactgtatatgttaatgaaatgctatttattatgtaaatagtcattttaccctgtggtgcacgtttgagcaaacaaataatgacctaagcacagtatttattgcatcaaatatgtaccacaagaaatgtagagtgcaagctttacacaggtaataaaatgtattctgtaccatttatagatagtttggatgctatcaatgcatgtttatattaccatgctgctgtatctggtttctctcactgctcagaatctcatttatgagaaaccatatgtcagtggtaaagtcaaggaaattgttcaacagatctcatttatttaagtcattaagcaatagtttgcagcactttaacagctttttggttatttttacattttaagtggataacatatggtatatagccagactgtacagacatgtttaaaaaaacacactgcttaacctattaaatatgtgtttagaattttataagcaaatataaatactgtaaaaagtcactttattttatttttcagcattatgtacataaatatgaagaggaaattatcttcaggttgatatcacaatcacttttcttactttctgtccatagtactttttcatgaaagaaatttgctaaataagacatgaaaacaagactgggtagttgtagatttctgctttttaaattacatttgctaattttagattatttcacaattttaaggagcaaaataggttcacgattcatatccaaattatgctttgcaattggaaaagggtttaaaattttatttatatttctggtagtacctgtactaactgaattgaaggtagtgcttatgttatttttgttctttttttctgacttcggtttatgttttcatttctttggagtaatgctgctctagattgttctaaatagaatgtgggcttcataatttttttttccacaaaaacagagtagtcaacttatatagtcaattacatcaggacattttgtgtttcttacagaagcaaaccataggctcctcttttccttaaaactacttagataaactgtattcgtgaactgcatgctggaaaatgctactattatgctaaataatgctaaccaacatttaaaatgtgcaaaactaataaagattacattttttatttt

SEQ ID NO: 8 - DNA, 8381 bp, Homo sapiens
atactgcagaggtctctggtgcatgtgtgtatgtgtgcgtttgtgtgtgtttgtgtgtctgtgtgttctgccccagtgagactgcagcccttgtaaatactttgacaccttttgcaagaaggaatctgaacaattgcaactgaaggcacattgttatcatctcgtctttgggtgatgctgttcctcactgcagatggataattttccttttaatcaggaatttcatatgcagaataaatggtaattaaaatgtgcaggatgacaagatggagcaaacagtgcttgtaccaccaggacctgacagcttcaacttcttcaccagagaatctcttgcggctattgaaagacgcattgcagaagaaaaggcaaagaatcccaaaccagacaaaaaagatgacgacgaaaatggcccaaagccaaatagtgacttggaagctggaaagaaccttccatttatttatggagacattcctccagagatggtgtcagagcccctggaggacctggacccctactatatcaataagaaaacttttatagtattgaataaattgaaggccatcttccggttcagtgccacctctgccctgtacattttaactcccttcaatcctcttaggaaaatagctattaagattttggtacattcattattcagcatgctaattatgtgcactattttgacaaactgtgtgtttatgacaatgagtaaccctcctgattggacaaagaatgtagaatacaccttcacaggaatatatacttttgaatcacttataaaaattattgcaaggggattctgtttagaagattttactttccttcgggatccatggaactggctcgatttcactgtcattacatttgcgtacgtcacagagtttgtggacctgggcaatgtctcggcattgagaacattcagagttctccgagcattgaagacgatttcagtcattccaggcctgaaaaccattgtgggagccctgatccagtctgtgaagaagctctcagatgtaatgatcctgactgtgttctgtctgagcgtatttgctctaattgggctgcagctgttcatgggcaacctgaggaataaatgtatacaatggcctcccaccaatgcttccttggaggaacatagtatagaaaagaatataactgtgaattataatggtacacttataaatgaaactgtctttgagtttgactggaagtcatatattcaagattcaagatatcattatttcctggagggttttttagatgcactactatgtggaaatagctctgatgcaggccaatgtccagagggatatatgtgtgtgaaagctggtagaaatcccaattatggctacacaagctttgataccttcagttgggcttttttgtccttgtttcgactaatgactcaggacttctgggaaaatctttatcaactgacattacgtgctgctgggaaaacgtacatgatattttttgtattggtcattttcttgggctcattctacctaataaatttgatcctggctgtggtggccatggcctacgaggaacagaatcaggccaccttggaagaagcagaacagaaagaggccgaatttcagcagatgattgaacagcttaaaaagcaacaggaggcagctcagcaggcagcaacggcaactgcctcagaacattccagagagcccagtgcagcaggcaggctctcagacagctcatctgaagcctctaagttgagttccaagagtgctaaggaaagaagaaatcggaggaagaaaagaaaacagaaagagcagtctggtggggaagagaaagatgaggatgaattccaaaaatctgaatctgaggacagcatcaggaggaaaggttttcgcttctccattgaagggaaccgattgacatatgaaaagaggtactcctccccacaccagtctttgttgagcatccgtggctccctattttcaccaaggcgaaatagcagaacaagccttttcagctttagagggcgagcaaaggatgtgggatctgagaacgacttcgcagatgatgagcacagcacctttgaggataacgagagccgtagagattccttgtttgtgccccgacgacacggagagagacgcaacagcaacctgagtcagaccagtaggtcatcccggatgctggcagtgtttccagcgaatgggaagatgcacagcactgtggattgcaatggtgtggtttccttggttggtggaccttcagttcctacatcgcctgttggacagcttctgccagaggtgataatagataagccagctactgatgacaatggaacaaccactgaaactgaaatgagaaagagaaggtcaagttctttccacgtttccatggactttctagaagatccttcccaaaggcaacgagcaatgagtatagccagcattctaacaaatacagtagaagaacttgaagaatccaggcagaaatgcccaccctgttggtataaattttccaacatattcttaatctgggactgttctccatattggttaaaagtgaaacatgttgtcaacctggttgtgatggacccatttgttgacctggccatcaccatctgtattgtcttaaatactcttttcatggccatggagcactatccaatgacggaccatttcaataatgtgcttacagtaggaaacttggttttcactgggatctttacagcagaaatgtttctgaaaattattgccatggatccttactattatttccaagaaggctggaatatctttgacggttttattgtgacgcttagcctggtagaacttggactcgccaatgtggaaggattatctgttctccgttcatttcgattgctgcgagttttcaagttggcaaaatcttggccaacgttaaatatgctaataaagatcatcggcaattccgtgggggctctgggaaatttaaccctcgtcttggccatcatcgtcttcatttttgccgtggtcggcatgcagctctttggtaaaagctacaaagattgtgtctgcaagatcgccagtgattgtcaactcccacgctggcacatgaatgacttcttccactccttcctgattgtgttccgcgtgctgtgtggggagtggatagagaccatgtgggactgtatggaggttgctggtcaagccatgtgccttactgtcttcatgatggtcatggtgattggaaacctagtggtcctgaatctctttctggccttgcttctgagctcatttagtgcagacaaccttgcagccactgatgatgataatgaaatgaataatctccaaattgctgtggataggatgcacaaaggagtagcttatgtgaaaagaaaaatatatgaatttattcaacagtccttcattaggaaacaaaagattttagatgaaattaaaccacttgatgatctaaacaacaagaaagacagttgtatgtccaatcatacaacagaaattgggaaagatcttgactatcttaaagatgtaaatggaactacaagtggtataggaactggcagcagtgttgaaaaatacattattgatgaaagtgattacatgtcattcataaacaaccccagtcttactgtgactgtaccaattgctgtaggagaatctgactttgaaaatttaaacacggaagactttagtagtgaatcggatctggaagaaagcaaagagaaactgaatgaaagcagtagctcatcagaaggtagcactgtggacatcggcgcacctgtagaagaacagcccgtagtggaacctgaagaaactcttgaaccagaagcttgtttcactgaaggctgtgtacaaagattcaagtgttgtcaaatcaatgtggaagaaggcagaggaaaacaatggtggaacctgagaaggacgtgtttccgaatagttgaacataactggtttgagaccttcattgttttcatgattctccttagtagtggtgctctggcatttgacgatatatatattgatcagcgaaagacgattaagacgatgttggaatatgctgacaaggttttcacttacattttcattctggaaatgcttctaaaatgggtggcatatggctatcaaacatatttcaccaatgcctggtgttggctggacttcttaattgttgatgtttcattggtcagtttaacagcaaatgccttgggttactcagaacttggagccatcaaatctctcaggacactaagagctctgagacctctaagagccttatctcgatttgaagggatgagggtggttgtgaatgcccttttaggagcaattccatccatcatgaatgtgcttctggtttgtcttatattctggctaattttcagcatcatgggcgtaaatttgtttgctggcaaattctaccactgtattaacaccacaactggtgacaggtttgacatcgaagacgtgaataatcatactgattgcctaaaactaatagaaagaaatgagactgctcgatggaaaaatgtgaaagtaaactttgataatgtaggatttgggtatctctctttgcttcaagttgccacattcaaaggatggatggatataatgtatgcagcagttgattccagaaatgtggaactccagcctaagtatgaaaaaagtctgtacatgtatctttactttgttattttcatcatctttgggtccttcttcaccttgaacctgtttattggtgtcatcatagataatttcaaccagcagaaaaagaagtttggaggtcaagacatctttatgacagaagaacagaagaaatactataatgcaatgaaaaaattaggatcgaaaaaaccgcaaaagcctatacctcgaccaggaaacaaatttcaaggaatggtctttgacttcgtaaccagacaagtttttgacataagcatcatgattctcatctgtcttaacatggtcacaatgatggtggaaacagatgaccagagtgaatatgtgactaccattttgtcacgcatcaatctggtgttcattgtgctatttactggagagtgtgtactgaaactcatctctctacgccattattattttaccattggatggaatatttttgattttgtggttgtcattctctccattgtaggtatgtttcttgccgagctgatagaaaagtatttcgtgtcccctaccctgttccgagtgatccgtcttgctaggattggccgaatcctacgtctgatcaaaggagcaaaggggatccgcacgctgctctttgctttgatgatgtcccttcctgcgttgtttaacatcggcctcctactcttcctagtcatgttcatctacgccatctttgggatgtccaactttgcctatgttaagagggaagttgggatcgatgacatgttcaactttgagacctttggcaacagcatgatctgcctattccaaattacaacctctgctggctgggatggattgctagcacccattctcaacagtaagccacccgactgtgaccctaataaagttaaccctggaagctcagttaagggagactgtgggaacccatctgttggaattttcttttttgtcagttacatcatcatatccttcctggttgtggtgaacatgtacatcgcggtcatcctggagaacttcagtgttgctactgaagaaagtgcagagcctctgagtgaggatgactttgagatgttctatgaggtttgggagaagtttgatcccgatgcaactcagttcatggaatttgaaaaattatctcagtttgcagctgcgcttgaaccgcctctcaatctgccacaaccaaacaaactccagctcattgccatggatttgcccatggtgagtggtgaccggatccactgtcttgatatcttatttgcttttacaaagcgggttctaggagagagtggagagatggatgctctacgaatacagatggaagagcgattcatggcttccaatccttccaaggtctcctatcagccaatcactactactttaaaacgaaaacaagaggaagtatctgctgtcattattcagcgtgcttacagacgccaccttttaaagcgaactgtaaaacaagcttcctttacgtacaataaaaacaaaatcaaaggtggggctaatcttcttataaaagaagacatgataattgacagaataaatgaaaactctattacagaaaaaactgatctgaccatgtccactgcagcttgtccaccttcctatgaccgggtgacaaagccaattgtggaaaaacatgagcaagaaggcaaagatgaaaaagccaaagggaaataaatgaaaataaataaaaataattgggtgacaaattgtttacagcctgtgaaggtgatgtatttttatcaacaggactcctttaggaggtcaatgccaaactgactgtttttacacaaatctccttaaggtcagtgcctacaataagacagtgaccccttgtcagcaaactgtgactctgtgtaaaggggagatgaccttgacaggaggttactgttctcactaccagctgacactgctgaagataagatgcacaatggctagtcagactgtagggaccagtttcaaggggtgcaaacctgtgattttggggttgtttaacatgaaacactttagtgtagtaattgtatccactgtttgcatttcaactgccacatttgtcacatttttatggaatctgttagtggattcatctttttgttaatccatgtgtttattatatgtgactatttttgtaaacgaagtttctgttgagaaataggctaaggacctctataacaggtatgccacctggggggtatggcaaccacatggccctcccagctacacaaagtcgtggtttgcatgagggcatgctgcacttagagatcatgcatgagaaaaagtcacaagaaaaacaaattcttaaatttcaccatatttctgggaggggtaattgggtgataagtggaggtgctttgttgatcttgttttgcgaaatccagcccctagaccaagtagattatttgtgggtaggccagtaaatcttagcaggtgcaaacttcattcaaatgtttggagtcataaatgttatgtttctttttgttgtattaaaaaaaaaacctgaatagtgaatattgcccctcaccctccaccgccagaagactgaattgaccaaaattactctttataaatttctgctttttcctgcactttgtttagccatctttgggctctcagcaaggttgacactgtatatgttaatgaaatgctatttattatgtaaatagtcattttaccctgtggtgcacgtttgagcaaacaaataatgacctaagcacagtatttattgcatcaaatatgtaccacaagaaatgtagagtgcaagctttacacaggtaataaaatgtattctgtaccatttatagatagtttggatgctatcaatgcatgtttatattaccatgctgctgtatctggtttctctcactgctcagaatctcatttatgagaaaccatatgtcagtggtaaagtcaaggaaattgttcaacagatctcatttatttaagtcattaagcaatagtttgcagcactttaacagctttttggttatttttacattttaagtggataacatatggtatatagccagactgtacagacatgtttaaaaaaacacactgcttaacctattaaatatgtgtttagaattttataagcaaatataaatactgtaaaaagtcactttattttatttttcagcattatgtacataaatatgaagaggaaattatcttcaggttgatatcacaatcacttttcttactttctgtccatagtactttttcatgaaagaaatttgctaaataagacatgaaaacaagactgggtagttgtagatttctgctttttaaattacatttgctaattttagattatttcacaattttaaggagcaaaataggttcacgattcatatccaaattatgctttgcaattggaaaagggtttaaaattttatttatatttctggtagtacctgtactaactgaattgaaggtagtgcttatgttatttttgttctttttttctgacttcggtttatgttttcatttctttggagtaatgctgctctagattgttctaaatagaatgtgggcttcataatttttttttccacaaaaacagagtagtcaacttatatagtcaattacatcaggacattttgtgtttcttacagaagcaaaccataggctcctcttttccttaaaactacttagataaactgtattcgtgaactgcatgctggaaaatgctactattatgctaaataatgctaaccaacatttaaaatgtgcaaaactaataaagattacattttttatttt

SEQ ID NO: 9 - DNA, 8381 bp, Homo sapiens
atactgcagaggtctctggtgcatgtgtgtatgtgtgcgtttgtgtgtgtttgtgtgtctgtgtgttctgccccagtgagactgcagcccttgtaaatactttgacaccttttgcaagaaggaatctgaacaattgcaactgaaggcacattgttatcatctcgtctttgggtgatgctgttcctcactgcagatggataattttccttttaatcaggaatttcatatgcagaataaatggtaattaaaatgtgcaggatgacaagatggagcaaacagtgcttgtaccaccaggacctgacagcttcaacttcttcaccagagaatctcttgcggctattgaaagacgcattgcagaagaaaaggcaaagaatcccaaaccagacaaaaaagatgacgacgaaaatggcccaaagccaaatagtgacttggaagctggaaagaaccttccatttatttatggagacattcctccagagatggtgtcagagcccctggaggacctggacccctactatatcaataagaaaacttttatagtattgaataaattgaaggccatcttccggttcagtgccacctctgccctgtacattttaactcccttcaatcctcttaggaaaatagctattaagattttggtacattcattattcagcatgctaattatgtgcactattttgacaaactgtgtgtttatgacaatgagtaaccctcctgattggacaaagaatgtagaatacaccttcacaggaatatatacttttgaatcacttataaaaattattgcaaggggattctgtttagaagattttactttccttcgggatccatggaactggctcgatttcactgtcattacatttgcgtacgtcacagagtttgtggacctgggcaatgtctcggcattgagaacattcagagttctccgagcattgaagacgatttcagtcattccaggcctgaaaaccattgtgggagccctgatccagtctgtgaagaagctctcagatgtaatgatcctgactgtgttctgtctgagcgtatttgctctaattgggctgcagctgttcatgggcaacctgaggaataaatgtatacaatggcctcccaccaatgcttccttggaggaacatagtatagaaaagaatataactgtgaattataatggtacacttataaatgaaactgtctttgagtttgactggaagtcatatattcaagattcaagatatcattatttcctggagggttttttagatgcactactatgtggaaatagctctgatgcaggccaatgtccagagggatatatgtgtgtgaaagctggtagaaatcccaattatggctacacaagctttgataccttcagttgggcttttttgtccttgtttcgactaatgactcaggacttctgggaaaatctttatcaactgacattacgtgctgctgggaaaacgtacatgatattttttgtattggtcattttcttgggctcattctacctaataaatttgatcctggctgtggtggccatggcctacgaggaacagaatcaggccaccttggaagaagcagaacagaaagaggccgaatttcagcagatgattgaacagcttaaaaagcaacaggaggcagctcagcaggcagcaacggcaactgcctcagaacattccagagagcccagtgcagcaggcaggctctcagacagctcatctgaagcctctaagttgagttccaagagtgctaaggaaagaagaaatcggaggaagaaaagaaaacagaaagagcagtctggtggggaagagaaagatgaggatgaattccaaaaatctgaatctgaggacagcatcaggaggaaaggttttcgcttctccattgaagggaaccgattgacatatgaaaagaggtactcctccccacaccagtctttgttgagcatccgtggctccctattttcaccaaggcgaaatagcagaacaagccttttcagctttagagggcgagcaaaggatgtgggatctgagaacgacttcgcagatgatgagcacagcacctttgaggataacgagagccgtagagattccttgtttgtgccccgacgacacggagagagacgcaacagcaacctgagtcagaccagtaggtcatcccggatgctggcagtgtttccagcgaatgggaagatgcacagcactgtggattgcaatggtgtggtttccttggttggtggaccttcagttcctacatcgcctgttggacagcttctgccagaggtgataatagataagccagctactgatgacaatggaacaaccactgaaactgaaatgagaaagagaaggtcaagttctttccacgtttccatggactttctagaagatccttcccaaaggcaacgagcaatgagtatagccagcattctaacaaatacagtagaagaacttgaagaatccaggcagaaatgcccaccctgttggtataaattttccaacatattcttaatctgggactgttctccatattggttaaaagtgaaacatgttgtcaacctggttgtgatggacccatttgttgacctggccatcaccatctgtattgtcttaaatactcttttcatggccatggagcactatccaatgacggaccatttcaataatgtgcttacagtaggaaacttggttttcactgggatctttacagcagaaatgtttctgaaaattattgccatggatccttactattatttccaagaaggctggaatatctttgacggttttattgtgacgcttagcctggtagaacttggactcgccaatgtggaaggattatctgttctccgttcatttcgattgctgcgagttttcaagttggcaaaatcttggccaacgttaaatatgctaataaagatcatcggcaattccgtgggggctctgggaaatttaaccctcgtcttggccatcatcgtcttcatttttgccgtggtcggcatgcagctctttggtaaaagctacaaagattgtgtctgcaagatcgccagtgattgtcaactcccacgctggcacatgaatgacttcttccactccttcctgattgtgttccgcgtgctgtgtggggagtggatagagaccatgtgggactgtatggaggttgctggtcaagccatgtgccttactgtcttcatgatggtcatggtgattggaaacctagtggtcctgaatctctttctggccttgcttctgagctcatttagtgcagacaaccttgcagccactgatgatgataatgaaatgaataatctccaaattgctgtggataggatgcacaaaggagtagcttatgtgaaaagaaaaatatatgaatttattcaacagtccttcattaggaaacaaaagattttagatgaaattaaaccacttgatgatctaaacaacaagaaagacagttgtatgtccaatcatacaacagaaattgggaaagatcttgactatcttaaagatgtaaatggaactacaagtggtataggaactggcagcagtgttgaaaaatacattattgatgaaagtgattacatgtcattcataaacaaccccagtcttactgtgactgtaccaattgctgtaggagaatctgactttgaaaatttaaacacggaagactttagtagtgaatcggatctggaagaaagcaaagagaaactgaatgaaagcagtagctcatcagaaggtagcactgtggacatcggcgcacctgtagaagaacagcccgtagtggaacctgaagaaactcttgaaccagaagcttgtttcactgaaggctgtgtacaaagattcaagtgttgtcaaatcaatgtggaagaaggcagaggaaaacaatggtggaacctgagaaggacgtgtttccgaatagttgaacataactggtttgagaccttcattgttttcatgattctccttagtagtggtgctctggcatttgaagatatatatattgatcagcgaaagacgattaagacgatgttggaatatgctgacaaggttttcacttacattttcattctggaaatgcttctaaaatgggtggcatatggctatcaaacatatttcaccaatgcctggtgttggctggacttcttaattgttgatgtttcattggtcagtttaacagcaaatgccttgggttactcagaacttggagccatcaaatctctcaggacactaagagctctgagacctctaagagccttatctcgatttgaagggatgagggtggttgtgaatgcccttttaggagcaattccatccatcatgaatgtgcttctggtttgtcttatattctggctaattttcagcatcatgggcgtaaatttgtttgctggcaaattctaccactgtattaacaccacaactggtgacaggtttgacatcgaagacgtgaataatcatactgatggcctaaaactaatagaaagaaatgagactgctcgatggaaaaatgtgaaagtaaactttgataatgtaggatttgggtatctctctttgcttcaagttgccacattcaaaggatggatggatataatgtatgcagcagttgattccagaaatgtggaactccagcctaagtatgaaaaaagtctgtacatgtatctttactttgttattttcatcatctttgggtccttcttcaccttgaacctgtttattggtgtcatcatagataatttcaaccagcagaaaaagaagtttggaggtcaagacatctttatgacagaagaacagaagaaatactataatgcaatgaaaaaattaggatcgaaaaaaccgcaaaagcctatacctcgaccaggaaacaaatttcaaggaatggtctttgacttcgtaaccagacaagtttttgacataagcatcatgattctcatctgtcttaacatggtcacaatgatggtggaaacagatgaccagagtgaatatgtgactaccattttgtcacgcatcaatctggtgttcattgtgctatttactggagagtgtgtactgaaactcatctctctacgccattattattttaccattggatggaatatttttgattttgtggttgtcattctctccattgtaggtatgtttcttgccgagctgatagaaaagtatttcgtgtcccctaccctgttccgagtgatccgtcttgctaggattggccgaatcctacgtctgatcaaaggagcaaaggggatccgcacgctgctctttgctttgatgatgtcccttcctgcgttgtttaacatcggcctcctactcttcctagtcatgttcatctacgccatctttgggatgtccaactttgcctatgttaagagggaagttgggatcgatgacatgttcaactttgagacctttggcaacagcatgatctgcctattccaaattacaacctctgctggctgggatggattgctagcacccattctcaacagtaagccacccgactgtgaccctaataaagttaaccctggaagctcagttaagggagactgtgggaacccatctgttggaattttcttttttgtcagttacatcatcatatccttcctggttgtggtgaacatgtacatcgcggtcatcctggagaacttcagtgttgctactgaagaaagtgcagagcctctgagtgaggatgactttgagatgttctatgaggtttgggagaagtttgatcccgatgcaactcagttcatggaatttgaaaaattatctcagtttgcagctgcgcttgaaccgcctctcaatctgccacaaccaaacaaactccagctcattgccatggatttgcccatggtgagtggtgaccggatccactgtcttgatatcttatttgcttttacaaagcgggttctaggagagagtggagagatggatgctctacgaatacagatggaagagcgattcatggcttccaatccttccaaggtctcctatcagccaatcactactactttaaaacgaaaacaagaggaagtatctgctgtcattattcagcgtgcttacagacgccaccttttaaagcgaactgtaaaacaagcttcctttacgtacaataaaaacaaaatcaaaggtggggctaatcttcttataaaagaagacatgataattgacagaataaatgaaaactctattacagaaaaaactgatctgaccatgtccactgcagcttgtccaccttcctatgaccgggtgacaaagccaattgtggaaaaacatgagcaagaaggcaaagatgaaaaagccaaagggaaataaatgaaaataaataaaaataattgggtgacaaattgtttacagcctgtgaaggtgatgtatttttatcaacaggactcctttaggaggtcaatgccaaactgactgtttttacacaaatctccttaaggtcagtgcctacaataagacagtgaccccttgtcagcaaactgtgactctgtgtaaaggggagatgaccttgacaggaggttactgttctcactaccagctgacactgctgaagataagatgcacaatggctagtcagactgtagggaccagtttcaaggggtgcaaacctgtgattttggggttgtttaacatgaaacactttagtgtagtaattgtatccactgtttgcatttcaactgccacatttgtcacatttttatggaatctgttagtggattcatctttttgttaatccatgtgtttattatatgtgactatttttgtaaacgaagtttctgttgagaaataggctaaggacctctataacaggtatgccacctggggggtatggcaaccacatggccctcccagctacacaaagtcgtggtttgcatgagggcatgctgcacttagagatcatgcatgagaaaaagtcacaagaaaaacaaattcttaaatttcaccatatttctgggaggggtaattgggtgataagtggaggtgctttgttgatcttgttttgcgaaatccagcccctagaccaagtagattatttgtgggtaggccagtaaatcttagcaggtgcaaacttcattcaaatgtttggagtcataaatgttatgtttctttttgttgtattaaaaaaaaaacctgaatagtgaatattgcccctcaccctccaccgccagaagactgaattgaccaaaattactctttataaatttctgctttttcctgcactttgtttagccatctttgggctctcagcaaggttgacactgtatatgttaatgaaatgctatttattatgtaaatagtcattttaccctgtggtgcacgtttgagcaaacaaataatgacctaagcacagtatttattgcatcaaatatgtaccacaagaaatgtagagtgcaagctttacacaggtaataaaatgtattctgtaccatttatagatagtttggatgctatcaatgcatgtttatattaccatgctgctgtatctggtttctctcactgctcagaatctcatttatgagaaaccatatgtcagtggtaaagtcaaggaaattgttcaacagatctcatttatttaagtcattaagcaatagtttgcagcactttaacagctttttggttatttttacattttaagtggataacatatggtatatagccagactgtacagacatgtttaaaaaaacacactgcttaacctattaaatatgtgtttagaattttataagcaaatataaatactgtaaaaagtcactttattttatttttcagcattatgtacataaatatgaagaggaaattatcttcaggttgatatcacaatcacttttcttactttctgtccatagtactttttcatgaaagaaatttgctaaataagacatgaaaacaagactgggtagttgtagatttctgctttttaaattacatttgctaattttagattatttcacaattttaaggagcaaaataggttcacgattcatatccaaattatgctttgcaattggaaaagggtttaaaattttatttatatttctggtagtacctgtactaactgaattgaaggtagtgcttatgttatttttgttctttttttctgacttcggtttatgttttcatttctttggagtaatgctgctctagattgttctaaatagaatgtgggcttcataatttttttttccacaaaaacagagtagtcaacttatatagtcaattacatcaggacattttgtgtttcttacagaagcaaaccataggctcctcttttccttaaaactacttagataaactgtattcgtgaactgcatgctggaaaatgctactattatgctaaataatgctaaccaacatttaaaatgtgcaaaactaataaagattacattttttatttt

SEQ ID NO: 10 - DNA, 8381 bp, Homo sapiens
atactgcagaggtctctggtgcatgtgtgtatgtgtgcgtttgtgtgtgtttgtgtgtctgtgtgttctgccccagtgagactgcagcccttgtaaatactttgacaccttttgcaagaaggaatctgaacaattgcaactgaaggcacattgttatcatctcgtctttgggtgatgctgttcctcactgcagatggataattttccttttaatcaggaatttcatatgcagaataaatggtaattaaaatgtgcaggatgacaagatggagcaaacagtgcttgtaccaccaggacctgacagcttcaacttcttcaccagagaatctcttgcggctattgaaagacgcattgcagaagaaaaggcaaagaatcccaaaccagacaaaaaagatgacgacgaaaatggcccaaagccaaatagtgacttggaagctggaaagaaccttccatttatttatggagacattcctccagagatggtgtcagagcccctggaggacctggacccctactatatcaataagaaaacttttatagtattgaataaattgaaggccatcttccggttcagtgccacctctgccctgtacattttaactcccttcaatcctcttaggaaaatagctattaagattttggtacattcattattcagcatgctaattatgtgcactattttgacaaactgtgtgtttatgacaatgagtaaccctcctgattggacaaagaatgtagaatacaccttcacaggaatatatacttttgaatcacttataaaaattattgcaaggggattctgtttagaagattttactttccttcgggatccatggaactggctcgatttcactgtcattacatttgcgtacgtcacagagtttgtggacctgggcaatgtctcggcattgagaacattcagagttctccgagcattgaagacgatttcagtcattccaggcctgaaaaccattgtgggagccctgatccagtctgtgaagaagctctcagatgtaatgatcctgactgtgttctgtctgagcgtatttgctctaattgggctgcagctgttcatgggcaacctgaggaataaatgtatacaatggcctcccaccaatgcttccttggaggaacatagtatagaaaagaatataactgtgaattataatggtacacttataaatgaaactgtctttgagtttgactggaagtcatatattcaagattcaagatatcattatttcctggagggttttttagatgcactactatgtggaaatagctctgatgcaggccaatgtccagagggatatatgtgtgtgaaagctggtagaaatcccaattatggctacacaagctttgataccttcagttgggcttttttgtccttgtttcgactaatgactcaggacttctgggaaaatctttatcaactgacattacgtgctgctgggaaaacgtacatgatattttttgtattggtcattttcttgggctcattctacctaataaatttgatcctggctgtggtggccatggcctacgaggaacagaatcaggccaccttggaagaagcagaacagaaagaggccgaatttcagcagatgattgaacagcttaaaaagcaacaggaggcagctcagcaggcagcaacggcaactgcctcagaacattccagagagcccagtgcagcaggcaggctctcagacagctcatctgaagcctctaagttgagttccaagagtgctaaggaaagaagaaatcggaggaagaaaagaaaacagaaagagcagtctggtggggaagagaaagatgaggatgaattccaaaaatctgaatctgaggacagcatcaggaggaaaggttttcgcttctccattgaagggaaccgattgacatatgaaaagaggtactcctccccacaccagtctttgttgagcatccgtggctccctattttcaccaaggcgaaatagcagaacaagccttttcagctttagagggcgagcaaaggatgtgggatctgagaacgacttcgcagatgatgagcacagcacctttgaggataacgagagccgtagagattccttgtttgtgccccgacgacacggagagagacgcaacagcaacctgagtcagaccagtaggtcatcccggatgctggcagtgtttccagcgaatgggaagatgcacagcactgtggattgcaatggtgtggtttccttggttggtggaccttcagttcctacatcgcctgttggacagcttctgccagaggtgataatagataagccagctactgatgacaatggaacaaccactgaaactgaaatgagaaagagaaggtcaagttctttccacgtttccatggactttctagaagatccttcccaaaggcaacgagcaatgagtatagccagcattctaacaaatacagtagaagaacttgaagaatccaggcagaaatgcccaccctgttggtataaattttccaacatattcttaatctgggactgttctccatattggttaaaagtgaaacatgttgtcaacctggttgtgatggacccatttgttgacctggccatcaccatctgtattgtcttaaatactcttttcatggccatggagcactatccaatgacggaccatttcaataatgtgcttacagtaggaaacttggttttcactgggatctttacagcagaaatgtttctgaaaattattgccatggatccttactattatttccaagaaggctggaatatctttgacggttttattgtgacgcttagcctggtagaacttggactcgccaatgtggaaggattatctgttctccgttcatttcgattgctgcgagttttcaagttggcaaaatcttggccaacgttaaatatgctaataaagatcatcggcaattccgtgggggctctgggaaatttaaccctcgtcttggccatcatcgtcttcatttttgccgtggtcggcatgcagctctttggtaaaagctacaaagattgtgtctgcaagatcgccagtgattgtcaactcccacgctggcacatgaatgacttcttccactccttcctgattgtgttccgcgtgctgtgtggggagtggatagagaccatgtgggactgtatggaggttgctggtcaagccatgtgccttactgtcttcatgatggtcatggtgattggaaacctagtggtcctgaatctctttctggccttgcttctgagctcatttagtgcagacaaccttgcagccactgatgatgataatgaaatgaataatctccaaattgctgtggataggatgcacaaaggagtagcttatgtgaaaagaaaaatatatgaatttattcaacagtccttcattaggaaacaaaagattttagatgaaattaaaccacttgatgatctaaacaacaagaaagacagttgtatgtccaatcatacaacagaaattgggaaagatcttgactatcttaaagatgtaaatggaactacaagtggtataggaactggcagcagtgttgaaaaatacattattgatgaaagtgattacatgtcattcataaacaaccccagtcttactgtgactgtaccaattgctgtaggagaatctgactttgaaaatttaaacacggaagactttagtagtgaatcggatctggaagaaagcaaagagaaactgaatgaaagcagtagctcatcagaaggtagcactgtggacatcggcgcacctgtagaagaacagcccgtagtggaacctgaagaaactcttgaaccagaagcttgtttcactgaaggctgtgtacaaagattcaagtgttgtcaaatcaatgtggaagaaggcagaggaaaacaatggtggaacctgagaaggacgtgtttccgaatagttgaacataactggtttgagaccttcattgttttcatgattctccttagtagtggtgctctggcatttgaagatatatatattgatcagcgaaagacgattaagacgatgttggaatatgctgacaaggttttcacttacattttcattctggaaatgcttctaaaatgggtggcatatggctatcaaacatatttcaccaatgcctggtgttggctggacttcttaattgttgatgtttcattggtcagtttaacagcaaatgccttgggttactcagaacttggagccatcaaatctctcaggacactaagagctctgagacctctaagagccttatctcgatttgaagggatgagggtggttgtgaatgcccttttaggagcaattccatccatcatgaatgtgcttctggtttgtcttatattctggctaattttcagcatcatgggcgtaaatttgtttgctggcaaattctaccactgtattaacaccacaactggtgacaggtttgacatcgaagacgtgaataatcatactgattgcctaaaactaatagaaagaaatgagactgctcgatggaaaaatgtgaaagtaaactttgataatgtaggatttgggtatctctctttgcttcaagttgccacattcaaaggatggatggatataatgtatgcaccagttgattccagaaatgtggaactccagcctaagtatgaaaaaagtctgtacatgtatctttactttgttattttcatcatctttgggtccttcttcaccttgaacctgtttattggtgtcatcatagataatttcaaccagcagaaaaagaagtttggaggtcaagacatctttatgacagaagaacagaagaaatactataatgcaatgaaaaaattaggatcgaaaaaaccgcaaaagcctatacctcgaccaggaaacaaatttcaaggaatggtctttgacttcgtaaccagacaagtttttgacataagcatcatgattctcatctgtcttaacatggtcacaatgatggtggaaacagatgaccagagtgaatatgtgactaccattttgtcacgcatcaatctggtgttcattgtgctatttactggagagtgtgtactgaaactcatctctctacgccattattattttaccattggatggaatatttttgattttgtggttgtcattctctccattgtaggtatgtttcttgccgagctgatagaaaagtatttcgtgtcccctaccctgttccgagtgatccgtcttgctaggattggccgaatcctacgtctgatcaaaggagcaaaggggatccgcacgctgctctttgctttgatgatgtcccttcctgcgttgtttaacatcggcctcctactcttcctagtcatgttcatctacgccatctttgggatgtccaactttgcctatgttaagagggaagttgggatcgatgacatgttcaactttgagacctttggcaacagcatgatctgcctattccaaattacaacctctgctggctgggatggattgctagcacccattctcaacagtaagccacccgactgtgaccctaataaagttaaccctggaagctcagttaagggagactgtgggaacccatctgttggaattttcttttttgtcagttacatcatcatatccttcctggttgtggtgaacatgtacatcgcggtcatcctggagaacttcagtgttgctactgaagaaagtgcagagcctctgagtgaggatgactttgagatgttctatgaggtttgggagaagtttgatcccgatgcaactcagttcatggaatttgaaaaattatctcagtttgcagctgcgcttgaaccgcctctcaatctgccacaaccaaacaaactccagctcattgccatggatttgcccatggtgagtggtgaccggatccactgtcttgatatcttatttgcttttacaaagcgggttctaggagagagtggagagatggatgctctacgaatacagatggaagagcgattcatggcttccaatccttccaaggtctcctatcagccaatcactactactttaaaacgaaaacaagaggaagtatctgctgtcattattcagcgtgcttacagacgccaccttttaaagcgaactgtaaaacaagcttcctttacgtacaataaaaacaaaatcaaaggtggggctaatcttcttataaaagaagacatgataattgacagaataaatgaaaactctattacagaaaaaactgatctgaccatgtccactgcagcttgtccaccttcctatgaccgggtgacaaagccaattgtggaaaaacatgagcaagaaggcaaagatgaaaaagccaaagggaaataaatgaaaataaataaaaataattgggtgacaaattgtttacagcctgtgaaggtgatgtatttttatcaacaggactcctttaggaggtcaatgccaaactgactgtttttacacaaatctccttaaggtcagtgcctacaataagacagtgaccccttgtcagcaaactgtgactctgtgtaaaggggagatgaccttgacaggaggttactgttctcactaccagctgacactgctgaagataagatgcacaatggctagtcagactgtagggaccagtttcaaggggtgcaaacctgtgattttggggttgtttaacatgaaacactttagtgtagtaattgtatccactgtttgcatttcaactgccacatttgtcacatttttatggaatctgttagtggattcatctttttgttaatccatgtgtttattatatgtgactatttttgtaaacgaagtttctgttgagaaataggctaaggacctctataacaggtatgccacctggggggtatggcaaccacatggccctcccagctacacaaagtcgtggtttgcatgagggcatgctgcacttagagatcatgcatgagaaaaagtcacaagaaaaacaaattcttaaatttcaccatatttctgggaggggtaattgggtgataagtggaggtgctttgttgatcttgttttgcgaaatccagcccctagaccaagtagattatttgtgggtaggccagtaaatcttagcaggtgcaaacttcattcaaatgtttggagtcataaatgttatgtttctttttgttgtattaaaaaaaaaacctgaatagtgaatattgcccctcaccctccaccgccagaagactgaattgaccaaaattactctttataaatttctgctttttcctgcactttgtttagccatctttgggctctcagcaaggttgacactgtatatgttaatgaaatgctatttattatgtaaatagtcattttaccctgtggtgcacgtttgagcaaacaaataatgacctaagcacagtatttattgcatcaaatatgtaccacaagaaatgtagagtgcaagctttacacaggtaataaaatgtattctgtaccatttatagatagtttggatgctatcaatgcatgtttatattaccatgctgctgtatctggtttctctcactgctcagaatctcatttatgagaaaccatatgtcagtggtaaagtcaaggaaattgttcaacagatctcatttatttaagtcattaagcaatagtttgcagcactttaacagctttttggttatttttacattttaagtggataacatatggtatatagccagactgtacagacatgtttaaaaaaacacactgcttaacctattaaatatgtgtttagaattttataagcaaatataaatactgtaaaaagtcactttattttatttttcagcattatgtacataaatatgaagaggaaattatcttcaggttgatatcacaatcacttttcttactttctgtccatagtactttttcatgaaagaaatttgctaaataagacatgaaaacaagactgggtagttgtagatttctgctttttaaattacatttgctaattttagattatttcacaattttaaggagcaaaataggttcacgattcatatccaaattatgctttgcaattggaaaagggtttaaaattttatttatatttctggtagtacctgtactaactgaattgaaggtagtgcttatgttatttttgttctttttttctgacttcggtttatgttttcatttctttggagtaatgctgctctagattgttctaaatagaatgtgggcttcataatttttttttccacaaaaacagagtagtcaacttatatagtcaattacatcaggacattttgtgtttcttacagaagcaaaccataggctcctcttttccttaaaactacttagataaactgtattcgtgaactgcatgctggaaaatgctactattatgctaaataatgctaaccaacatttaaaatgtgcaaaactaataaagattacattttttatttt

SEQ ID NO: 11 - DNA, 8381 bp, Homo sapiens
atactgcagaggtctctggtgcatgtgtgtatgtgtgcgtttgtgtgtgtttgtgtgtctgtgtgttctgccccagtgagactgcagcccttgtaaatactttgacaccttttgcaagaaggaatctgaacaattgcaactgaaggcacattgttatcatctcgtctttgggtgatgctgttcctcactgcagatggataattttccttttaatcaggaatttcatatgcagaataaatggtaattaaaatgtgcaggatgacaagatggagcaaacagtgcttgtaccaccaggacctgacagcttcaacttcttcaccagagaatctcttgcggctattgaaagacgcattgcagaagaaaaggcaaagaatcccaaaccagacaaaaaagatgacgacgaaaatggcccaaagccaaatagtgacttggaagctggaaagaaccttccatttatttatggagacattcctccagagatggtgtcagagcccctggaggacctggacccctactatatcaataagaaaacttttatagtattgaataaattgaaggccatcttccggttcagtgccacctctgccctgtacattttaactcccttcaatcctcttaggaaaatagctattaagattttggtacattcattattcagcatgctaattatgtgcactattttgacaaactgtgtgtttatgacaatgagtaaccctcctgattggacaaagaatgtagaatacaccttcacaggaatatatacttttgaatcacttataaaaattattgcaaggggattctgtttagaagattttactttccttcgggatccatggaactggctcgatttcactgtcattacatttgcgtacgtcacagagtttgtggacctgggcaatgtctcggcattgagaacattcagagttctccgagcattgaagacgatttcagtcattccaggcctgaaaaccattgtgggagccctgatccagtctgtgaagaagctctcagatgtaatgatcctgactgtgttctgtctgagcgtatttgctctaattgggctgcagctgttcatgggcaacctgaggaataaatgtatacaatggcctcccaccaatgcttccttggaggaacatagtatagaaaagaatataactgtgaattataatggtacacttataaatgaaactgtctttgagtttgactggaagtcatatattcaagattcaagatatcattatttcctggagggttttttagatgcactactatgtggaaatagctctgatgcaggccaatgtccagagggatatatgtgtgtgaaagctggtagaaatcccaattatggctacacaagctttgataccttcagttgggcttttttgtccttgtttcgactaatgactcaggacttctgggaaaatctttatcaactgacattacgtgctgctgggaaaacgtacatgatattttttgtattggtcattttcttgggctcattctacctaataaatttgatcctggctgtggtggccatggcctacgaggaacagaatcaggccaccttggaagaagcagaacagaaagaggccgaatttcagcagatgattgaacagcttaaaaagcaacaggaggcagctcagcaggcagcaacggcaactgcctcagaacattccagagagcccagtgcagcaggcaggctctcagacagctcatctgaagcctctaagttgagttccaagagtgctaaggaaagaagaaatcggaggaagaaaagaaaacagaaagagcagtctggtggggaagagaaagatgaggatgaattccaaaaatctgaatctgaggacagcatcaggaggaaaggttttcgcttctccattgaagggaaccgattgacatatgaaaagaggtactcctccccacaccagtctttgttgagcatccgtggctccctattttcaccaaggcgaaatagcagaacaagccttttcagctttagagggcgagcaaaggatgtgggatctgagaacgacttcgcagatgatgagcacagcacctttgaggataacgagagccgtagagattccttgtttgtgccccgacgacacggagagagacgcaacagcaacctgagtcagaccagtaggtcatcccggatgctggcagtgtttccagcgaatgggaagatgcacagcactgtggattgcaatggtgtggtttccttggttggtggaccttcagttcctacatcgcctgttggacagcttctgccagaggtgataatagataagccagctactgatgacaatggaacaaccactgaaactgaaatgagaaagagaaggtcaagttctttccacgtttccatggactttctagaagatccttcccaaaggcaacgagcaatgagtatagccagcattctaacaaatacagtagaagaacttgaagaatccaggcagaaatgcccaccctgttggtataaattttccaacatattcttaatctgggactgttctccatattggttaaaagtgaaacatgttgtcaacctggttgtgatggacccatttgttgacctggccatcaccatctgtattgtcttaaatactcttttcatggccatggagcactatccaatgacggaccatttcaataatgtgcttacagtaggaaacttggttttcactgggatctttacagcagaaatgtttctgaaaattattgccatggatccttactattatttccaagaaggctggaatatctttgacggttttattgtgacgcttagcctggtagaacttggactcgccaatgtggaaggattatctgttctccgttcatttcgattgctgcgagttttcaagttggcaaaatcttggccaacgttaaatatgctaataaagatcatcggcaattccgtgggggctctgggaaatttaaccctcgtcttggccatcatcgtcttcatttttgccgtggtcggcatgcagctctttggtaaaagctacaaagattgtgtctgcaagatcgccagtgattgtcaactcccacgctggcacatgaatgacttcttccactccttcctgattgtgttccgcgtgctgtgtggggagtggatagagaccatgtgggactgtatggaggttgctggtcaagccatgtgccttactgtcttcatgatggtcatggtgattggaaacctagtggtcctgaatctctttctggccttgcttctgagctcatttagtgcagacaaccttgcagccactgatgatgataatgaaatgaataatctccaaattgctgtggataggatgcacaaaggagtagcttatgtgaaaagaaaaatatatgaatttattcaacagtccttcattaggaaacaaaagattttagatgaaattaaaccacttgatgatctaaacaacaagaaagacagttgtatgtccaatcatacaacagaaattgggaaagatcttgactatcttaaagatgtaaatggaactacaagtggtataggaactggcagcagtgttgaaaaatacattattgatgaaagtgattacatgtcattcataaacaaccccagtcttactgtgactgtaccaattgctgtaggagaatctgactttgaaaatttaaacacggaagactttagtagtgaatcggatctggaagaaagcaaagagaaactgaatgaaagcagtagctcatcagaaggtagcactgtggacatcggcgcacctgtagaagaacagcccgtagtggaacctgaagaaactcttgaaccagaagcttgtttcactgaaggctgtgtacaaagattcaagtgttgtcaaatcaatgtggaagaaggcagaggaaaacaatggtggaacctgagaaggacgtgtttccgaatagttgaacataactggtttgagaccttcattgttttcatgattctccttagtagtggtgctctggcatttgaagatatatatattgatcagcgaaagacgattaagacgatgttggaatatgctgacaaggttttcacttacattttcattctggaaatgcttctaaaatgggtggcatatggctatcaaacatatttcaccaatgcctggtgttggctggacttcttaattgttgatgtttcattggtcagtttaacagcaaatgccttgggttactcagaacttggagccatcaaatctctcaggacactaagagctctgagacctctaagagccttatctcgatttgaagggatgagggtggttgtgaatgcccttttaggagcaattccatccatcatgaatgtgcttctggtttgtcttatattctggctaattttcagcatcatgggcgtaaatttgtttgctggcaaattctaccactgtattaacaccacaactggtgacaggtttgacatcgaagacgtgaataatcatactgattgcctaaaactaatagaaagaaatgagactgctcgatggaaaaatgtgaaagtaaactttgataatgtaggatttgggtatctctctttgcttcaagttgccacattcaaaggatggatggatataatgtatgcagcagttgattccagaaatgtggaactccagcctaagtatgaaaaaagtctgtacatgtatctttactttgttattttcatcatctttgggtccttcttcaccttgaacctgtttattggtgtcatcatagataatttcaaccagcagaaaaagaagtttggaggtcaagacatctttatgacagaagaacagaagaaatactataatgcaatgaaaaaattaggatcgaaaaaaccgcaaaagcctatacctcgaccaggaaacaaatttcaaggaatggtctttgacttcgtaaccagacaagtttttgacgtaagcatcatgattctcatctgtcttaacatggtcacaatgatggtggaaacagatgaccagagtgaatatgtgactaccattttgtcacgcatcaatctggtgttcattgtgctatttactggagagtgtgtactgaaactcatctctctacgccattattattttaccattggatggaatatttttgattttgtggttgtcattctctccattgtaggtatgtttcttgccgagctgatagaaaagtatttcgtgtcccctaccctgttccgagtgatccgtcttgctaggattggccgaatcctacgtctgatcaaaggagcaaaggggatccgcacgctgctctttgctttgatgatgtcccttcctgcgttgtttaacatcggcctcctactcttcctagtcatgttcatctacgccatctttgggatgtccaactttgcctatgttaagagggaagttgggatcgatgacatgttcaactttgagacctttggcaacagcatgatctgcctattccaaattacaacctctgctggctgggatggattgctagcacccattctcaacagtaagccacccgactgtgaccctaataaagttaaccctggaagctcagttaagggagactgtgggaacccatctgttggaattttcttttttgtcagttacatcatcatatccttcctggttgtggtgaacatgtacatcgcggtcatcctggagaacttcagtgttgctactgaagaaagtgcagagcctctgagtgaggatgactttgagatgttctatgaggtttgggagaagtttgatcccgatgcaactcagttcatggaatttgaaaaattatctcagtttgcagctgcgcttgaaccgcctctcaatctgccacaaccaaacaaactccagctcattgccatggatttgcccatggtgagtggtgaccggatccactgtcttgatatcttatttgcttttacaaagcgggttctaggagagagtggagagatggatgctctacgaatacagatggaagagcgattcatggcttccaatccttccaaggtctcctatcagccaatcactactactttaaaacgaaaacaagaggaagtatctgctgtcattattcagcgtgcttacagacgccaccttttaaagcgaactgtaaaacaagcttcctttacgtacaataaaaacaaaatcaaaggtggggctaatcttcttataaaagaagacatgataattgacagaataaatgaaaactctattacagaaaaaactgatctgaccatgtccactgcagcttgtccaccttcctatgaccgggtgacaaagccaattgtggaaaaacatgagcaagaaggcaaagatgaaaaagccaaagggaaataaatgaaaataaataaaaataattgggtgacaaattgtttacagcctgtgaaggtgatgtatttttatcaacaggactcctttaggaggtcaatgccaaactgactgtttttacacaaatctccttaaggtcagtgcctacaataagacagtgaccccttgtcagcaaactgtgactctgtgtaaaggggagatgaccttgacaggaggttactgttctcactaccagctgacactgctgaagataagatgcacaatggctagtcagactgtagggaccagtttcaaggggtgcaaacctgtgattttggggttgtttaacatgaaacactttagtgtagtaattgtatccactgtttgcatttcaactgccacatttgtcacatttttatggaatctgttagtggattcatctttttgttaatccatgtgtttattatatgtgactatttttgtaaacgaagtttctgttgagaaataggctaaggacctctataacaggtatgccacctggggggtatggcaaccacatggccctcccagctacacaaagtcgtggtttgcatgagggcatgctgcacttagagatcatgcatgagaaaaagtcacaagaaaaacaaattcttaaatttcaccatatttctgggaggggtaattgggtgataagtggaggtgctttgttgatcttgttttgcgaaatccagcccctagaccaagtagattatttgtgggtaggccagtaaatcttagcaggtgcaaacttcattcaaatgtttggagtcataaatgttatgtttctttttgttgtattaaaaaaaaaacctgaatagtgaatattgcccctcaccctccaccgccagaagactgaattgaccaaaattactctttataaatttctgctttttcctgcactttgtttagccatctttgggctctcagcaaggttgacactgtatatgttaatgaaatgctatttattatgtaaatagtcattttaccctgtggtgcacgtttgagcaaacaaataatgacctaagcacagtatttattgcatcaaatatgtaccacaagaaatgtagagtgcaagctttacacaggtaataaaatgtattctgtaccatttatagatagtttggatgctatcaatgcatgtttatattaccatgctgctgtatctggtttctctcactgctcagaatctcatttatgagaaaccatatgtcagtggtaaagtcaaggaaattgttcaacagatctcatttatttaagtcattaagcaatagtttgcagcactttaacagctttttggttatttttacattttaagtggataacatatggtatatagccagactgtacagacatgtttaaaaaaacacactgcttaacctattaaatatgtgtttagaattttataagcaaatataaatactgtaaaaagtcactttattttatttttcagcattatgtacataaatatgaagaggaaattatcttcaggttgatatcacaatcacttttcttactttctgtccatagtactttttcatgaaagaaatttgctaaataagacatgaaaacaagactgggtagttgtagatttctgctttttaaattacatttgctaattttagattatttcacaattttaaggagcaaaataggttcacgattcatatccaaattatgctttgcaattggaaaagggtttaaaattttatttatatttctggtagtacctgtactaactgaattgaaggtagtgcttatgttatttttgttctttttttctgacttcggtttatgttttcatttctttggagtaatgctgctctagattgttctaaatagaatgtgggcttcataatttttttttccacaaaaacagagtagtcaacttatatagtcaattacatcaggacattttgtgtttcttacagaagcaaaccataggctcctcttttccttaaaactacttagataaactgtattcgtgaactgcatgctggaaaatgctactattatgctaaataatgctaaccaacatttaaaatgtgcaaaactaataaagattacattttttatttt

SEQ ID NO: 12 - DNA, 8381 bp, Homo sapiens
atactgcagaggtctctggtgcatgtgtgtatgtgtgcgtttgtgtgtgtttgtgtgtctgtgtgttctgccccagtgagactgcagcccttgtaaatactttgacaccttttgcaagaaggaatctgaacaattgcaactgaaggcacattgttatcatctcgtctttgggtgatgctgttcctcactgcagatggataattttccttttaatcaggaatttcatatgcagaataaatggtaattaaaatgtgcaggatgacaagatggagcaaacagtgcttgtaccaccaggacctgacagcttcaacttcttcaccagagaatctcttgcggctattgaaagacgcattgcagaagaaaaggcaaagaatcccaaaccagacaaaaaagatgacgacgaaaatggcccaaagccaaatagtgacttggaagctggaaagaaccttccatttatttatggagacattcctccagagatggtgtcagagcccctggaggacctggacccctactatatcaataagaaaacttttatagtattgaataaattgaaggccatcttccggttcagtgccacctctgccctgtacattttaactcccttcaatcctcttaggaaaatagctattaagattttggtacattcattattcagcatgctaattatgtgcactattttgacaaactgtgtgtttatgacaatgagtaaccctcctgattggacaaagaatgtagaatacaccttcacaggaatatatacttttgaatcacttataaaaattattgcaaggggattctgtttagaagattttactttccttcgggatccatggaactggctcgatttcactgtcattacatttgcgtacgtcacagagtttgtggacctgggcaatgtctcggcattgagaacattcagagttctccgagcattgaagacgatttcagtcattccaggcctgaaaaccattgtgggagccctgatccagtctgtgaagaagctctcagatgtaatgatcctgactgtgttctgtctgagcgtatttgctctaattgggctgcagctgttcatgggcaacctgaggaataaatgtatacaatggcctcccaccaatgcttccttggaggaacatagtatagaaaagaatataactgtgaattataatggtacacttataaatgaaactgtctttgagtttgactggaagtcatatattcaagattcaagatatcattatttcctggagggttttttagatgcactactatgtggaaatagctctgatgcaggccaatgtccagagggatatatgtgtgtgaaagctggtagaaatcccaattatggctacacaagctttgataccttcagttgggcttttttgtccttgtttcgactaatgactcaggacttctgggaaaatctttatcaactgacattacgtgctgctgggaaaacgtacatgatattttttgtattggtcattttcttgggctcattctacctaataaatttgatcctggctgtggtggccatggcctacgaggaacagaatcaggccaccttggaagaagcagaacagaaagaggccgaatttcagcagatgattgaacagcttaaaaagcaacaggaggcagctcagcaggcagcaacggcaactgcctcagaacattccagagagcccagtgcagcaggcaggctctcagacagctcatctgaagcctctaagttgagttccaagagtgctaaggaaagaagaaatcggaggaagaaaagaaaacagaaagagcagtctggtggggaagagaaagatgaggatgaattccaaaaatctgaatctgaggacagcatcaggaggaaaggttttcgcttctccattgaagggaaccgattgacatatgaaaagaggtactcctccccacaccagtctttgttgagcatccgtggctccctattttcaccaaggcgaaatagcagaacaagccttttcagctttagagggcgagcaaaggatgtgggatctgagaacgacttcgcagatgatgagcacagcacctttgaggataacgagagccgtagagattccttgtttgtgccccgacgacacggagagagacgcaacagcaacctgagtcagaccagtaggtcatcccggatgctggcagtgtttccagcgaatgggaagatgcacagcactgtggattgcaatggtgtggtttccttggttggtggaccttcagttcctacatcgcctgttggacagcttctgccagaggtgataatagataagccagctactgatgacaatggaacaaccactgaaactgaaatgagaaagagaaggtcaagttctttccacgtttccatggactttctagaagatccttcccaaaggcaacgagcaatgagtatagccagcattctaacaaatacagtagaagaacttgaagaatccaggcagaaatgcccaccctgttggtataaattttccaacatattcttaatctgggactgttctccatattggttaaaagtgaaacatgttgtcaacctggttgtgatggacccatttgttgacctggccatcaccatctgtattgtcttaaatactcttttcatggccatggagcactatccaatgacggaccatttcaataatgtgcttacagtaggaaacttggttttcactgggatctttacagcagaaatgtttctgaaaattattgccatggatccttactattatttccaagaaggctggaatatctttgacggttttattgtgacgcttagcctggtagaacttggactcgccaatgtggaaggattatctgttctccgttcatttcgattgctgcgagttttcaagttggcaaaatcttggccaacgttaaatatgctaataaagatcatcggcaattccgtgggggctctgggaaatttaaccctcgtcttggccatcatcgtcttcatttttgccgtggtcggcatgcagctctttggtaaaagctacaaagattgtgtctgcaagatcgccagtgattgtcaactcccacgctggcacatgaatgacttcttccactccttcctgattgtgttccgcgtgctgtgtggggagtggatagagaccatgtgggactgtatggaggttgctggtcaagccatgtgccttactgtcttcatgatggtcatggtgattggaaacctagtggtcctgaatctctttctggccttgcttctgagctcatttagtgcagacaaccttgcagccactgatgatgataatgaaatgaataatctccaaattgctgtggataggatgcacaaaggagtagcttatgtgaaaagaaaaatatatgaatttattcaacagtccttcattaggaaacaaaagattttagatgaaattaaaccacttgatgatctaaacaacaagaaagacagttgtatgtccaatcatacaacagaaattgggaaagatcttgactatcttaaagatgtaaatggaactacaagtggtataggaactggcagcagtgttgaaaaatacattattgatgaaagtgattacatgtcattcataaacaaccccagtcttactgtgactgtaccaattgctgtaggagaatctgactttgaaaatttaaacacggaagactttagtagtgaatcggatctggaagaaagcaaagagaaactgaatgaaagcagtagctcatcagaaggtagcactgtggacatcggcgcacctgtagaagaacagcccgtagtggaacctgaagaaactcttgaaccagaagcttgtttcactgaaggctgtgtacaaagattcaagtgttgtcaaatcaatgtggaagaaggcagaggaaaacaatggtggaacctgagaaggacgtgtttccgaatagttgaacataactggtttgagaccttcattgttttcatgattctccttagtagtggtgctctggcatttgaagatatatatattgatcagcgaaagacgattaagacgatgttggaatatgctgacaaggttttcacttacattttcattctggaaatgcttctaaaatgggtggcatatggctatcaaacatatttcaccaatgcctggtgttggctggacttcttaattgttgatgtttcattggtcagtttaacagcaaatgccttgggttactcagaacttggagccatcaaatctctcaggacactaagagctctgagacctctaagagccttatctcgatttgaagggatgagggtggttgtgaatgcccttttaggagcaattccatccatcatgaatgtgcttctggtttgtcttatattctggctaattttcagcatcatgggcgtaaatttgtttgctggcaaattctaccactgtattaacaccacaactggtgacaggtttgacatcgaagacgtgaataatcatactgattgcctaaaactaatagaaagaaatgagactgctcgatggaaaaatgtgaaagtaaactttgataatgtaggatttgggtatctctctttgcttcaagttgccacattcaaaggatggatggatataatgtatgcagcagttgattccagaaatgtggaactccagcctaagtatgaaaaaagtctgtacatgtatctttactttgttattttcatcatctttgggtccttcttcaccttgaacctgtttattggtgtcatcatagataatttcaaccagcagaaaaagaagtttggaggtcaagacatctttatgacagaagaacagaagaaatactataatgcaatgaaaaaattaggatcgaaaaaaccgcaaaagcctatacctcgaccaggaaacaaatttcaaggaatggtctttgacttcgtaaccagacaagtttttgacataagcatcatgattctcatctgtcttaacatggtcacaatgatggtggaaacagatgaccagagtgaatatgtgactaccattttgtcacgcatcaatctggtgttcattgtgctatttactggagagtgtgtactgaaactcatctctctacgccattattattttaccattggatggaatatttttgattttgtggttgtcattctctccattgtaggtatgtttcttgccgagctgatagaaaagtatttcgtgtcccctaccctgttccgagtgatccgtcttgctaggattggccaaatcctacgtctgatcaaaggagcaaaggggatccgcacgctgctctttgctttgatgatgtcccttcctgcgttgtttaacatcggcctcctactcttcctagtcatgttcatctacgccatctttgggatgtccaactttgcctatgttaagagggaagttgggatcgatgacatgttcaactttgagacctttggcaacagcatgatctgcctattccaaattacaacctctgctggctgggatggattgctagcacccattctcaacagtaagccacccgactgtgaccctaataaagttaaccctggaagctcagttaagggagactgtgggaacccatctgttggaattttcttttttgtcagttacatcatcatatccttcctggttgtggtgaacatgtacatcgcggtcatcctggagaacttcagtgttgctactgaagaaagtgcagagcctctgagtgaggatgactttgagatgttctatgaggtttgggagaagtttgatcccgatgcaactcagttcatggaatttgaaaaattatctcagtttgcagctgcgcttgaaccgcctctcaatctgccacaaccaaacaaactccagctcattgccatggatttgcccatggtgagtggtgaccggatccactgtcttgatatcttatttgcttttacaaagcgggttctaggagagagtggagagatggatgctctacgaatacagatggaagagcgattcatggcttccaatccttccaaggtctcctatcagccaatcactactactttaaaacgaaaacaagaggaagtatctgctgtcattattcagcgtgcttacagacgccaccttttaaagcgaactgtaaaacaagcttcctttacgtacaataaaaacaaaatcaaaggtggggctaatcttcttataaaagaagacatgataattgacagaataaatgaaaactctattacagaaaaaactgatctgaccatgtccactgcagcttgtccaccttcctatgaccgggtgacaaagccaattgtggaaaaacatgagcaagaaggcaaagatgaaaaagccaaagggaaataaatgaaaataaataaaaataattgggtgacaaattgtttacagcctgtgaaggtgatgtatttttatcaacaggactcctttaggaggtcaatgccaaactgactgtttttacacaaatctccttaaggtcagtgcctacaataagacagtgaccccttgtcagcaaactgtgactctgtgtaaaggggagatgaccttgacaggaggttactgttctcactaccagctgacactgctgaagataagatgcacaatggctagtcagactgtagggaccagtttcaaggggtgcaaacctgtgattttggggttgtttaacatgaaacactttagtgtagtaattgtatccactgtttgcatttcaactgccacatttgtcacatttttatggaatctgttagtggattcatctttttgttaatccatgtgtttattatatgtgactatttttgtaaacgaagtttctgttgagaaataggctaaggacctctataacaggtatgccacctggggggtatggcaaccacatggccctcccagctacacaaagtcgtggtttgcatgagggcatgctgcacttagagatcatgcatgagaaaaagtcacaagaaaaacaaattcttaaatttcaccatatttctgggaggggtaattgggtgataagtggaggtgctttgttgatcttgttttgcgaaatccagcccctagaccaagtagattatttgtgggtaggccagtaaatcttagcaggtgcaaacttcattcaaatgtttggagtcataaatgttatgtttctttttgttgtattaaaaaaaaaacctgaatagtgaatattgcccctcaccctccaccgccagaagactgaattgaccaaaattactctttataaatttctgctttttcctgcactttgtttagccatctttgggctctcagcaaggttgacactgtatatgttaatgaaatgctatttattatgtaaatagtcattttaccctgtggtgcacgtttgagcaaacaaataatgacctaagcacagtatttattgcatcaaatatgtaccacaagaaatgtagagtgcaagctttacacaggtaataaaatgtattctgtaccatttatagatagtttggatgctatcaatgcatgtttatattaccatgctgctgtatctggtttctctcactgctcagaatctcatttatgagaaaccatatgtcagtggtaaagtcaaggaaattgttcaacagatctcatttatttaagtcattaagcaatagtttgcagcactttaacagctttttggttatttttacattttaagtggataacatatggtatatagccagactgtacagacatgtttaaaaaaacacactgcttaacctattaaatatgtgtttagaattttataagcaaatataaatactgtaaaaagtcactttattttatttttcagcattatgtacataaatatgaagaggaaattatcttcaggttgatatcacaatcacttttcttactttctgtccatagtactttttcatgaaagaaatttgctaaataagacatgaaaacaagactgggtagttgtagatttctgctttttaaattacatttgctaattttagattatttcacaattttaaggagcaaaataggttcacgattcatatccaaattatgctttgcaattggaaaagggtttaaaattttatttatatttctggtagtacctgtactaactgaattgaaggtagtgcttatgttatttttgttctttttttctgacttcggtttatgttttcatttctttggagtaatgctgctctagattgttctaaatagaatgtgggcttcataatttttttttccacaaaaacagagtagtcaacttatatagtcaattacatcaggacattttgtgtttcttacagaagcaaaccataggctcctcttttccttaaaactacttagataaactgtattcgtgaactgcatgctggaaaatgctactattatgctaaataatgctaaccaacatttaaaatgtgcaaaactaataaagattacattttttatttt

SEQ ID NO: 13 - DNA, 8381 bp, Homo sapiens
atactgcagaggtctctggtgcatgtgtgtatgtgtgcgtttgtgtgtgtttgtgtgtctgtgtgttctgccccagtgagactgcagcccttgtaaatactttgacaccttttgcaagaaggaatctgaacaattgcaactgaaggcacattgttatcatctcgtctttgggtgatgctgttcctcactgcagatggataattttccttttaatcaggaatttcatatgcagaataaatggtaattaaaatgtgcaggatgacaagatggagcaaacagtgcttgtaccaccaggacctgacagcttcaacttcttcaccagagaatctcttgcggctattgaaagacgcattgcagaagaaaaggcaaagaatcccaaaccagacaaaaaagatgacgacgaaaatggcccaaagccaaatagtgacttggaagctggaaagaaccttccatttatttatggagacattcctccagagatggtgtcagagcccctggaggacctggacccctactatatcaataagaaaacttttatagtattgaataaattgaaggccatcttccggttcagtgccacctctgccctgtacattttaactcccttcaatcctcttaggaaaatagctattaagattttggtacattcattattcagcatgctaattatgtgcactattttgacaaactgtgtgtttatgacaatgagtaaccctcctgattggacaaagaatgtagaatacaccttcacaggaatatatacttttgaatcacttataaaaattattgcaaggggattctgtttagaagattttactttccttcgggatccatggaactggctcgatttcactgtcattacatttgcgtacgtcacagagtttgtggacctgggcaatgtctcggcattgagaacattcagagttctccgagcattgaagacgatttcagtcattccaggcctgaaaaccattgtgggagccctgatccagtctgtgaagaagctctcagatgtaatgatcctgactgtgttctgtctgagcgtatttgctctaattgggctgcagctgttcatgggcaacctgaggaataaatgtatacaatggcctcccaccaatgcttccttggaggaacatagtatagaaaagaatataactgtgaattataatggtacacttataaatgaaactgtctttgagtttgactggaagtcatatattcaagattcaagatatcattatttcctggagggttttttagatgcactactatgtggaaatagctctgatgcaggccaatgtccagagggatatatgtgtgtgaaagctggtagaaatcccaattatggctacacaagctttgataccttcagttgggcttttttgtccttgtttcgactaatgactcaggacttctgggaaaatctttatcaactgacattacgtgctgctgggaaaacgtacatgatattttttgtattggtcattttcttgggctcattctacctaataaatttgatcctggctgtggtggccatggcctacgaggaacagaatcaggccaccttggaagaagcagaacagaaagaggccgaatttcagcagatgattgaacagcttaaaaagcaacaggaggcagctcagcaggcagcaacggcaactgcctcagaacattccagagagcccagtgcagcaggcaggctctcagacagctcatctgaagcctctaagttgagttccaagagtgctaaggaaagaagaaatcggaggaagaaaagaaaacagaaagagcagtctggtggggaagagaaagatgaggatgaattccaaaaatctgaatctgaggacagcatcaggaggaaaggttttcgcttctccattgaagggaaccgattgacatatgaaaagaggtactcctccccacaccagtctttgttgagcatccgtggctccctattttcaccaaggcgaaatagcagaacaagccttttcagctttagagggcgagcaaaggatgtgggatctgagaacgacttcgcagatgatgagcacagcacctttgaggataacgagagccgtagagattccttgtttgtgccccgacgacacggagagagacgcaacagcaacctgagtcagaccagtaggtcatcccggatgctggcagtgtttccagcgaatgggaagatgcacagcactgtggattgcaatggtgtggtttccttggttggtggaccttcagttcctacatcgcctgttggacagcttctgccagaggtgataatagataagccagctactgatgacaatggaacaaccactgaaactgaaatgagaaagagaaggtcaagttctttccacgtttccatggactttctagaagatccttcccaaaggcaacgagcaatgagtatagccagcattctaacaaatacagtagaagaacttgaagaatccaggcagaaatgcccaccctgttggtataaattttccaacatattcttaatctgggactgttctccatattggttaaaagtgaaacatgttgtcaacctggttgtgatggacccatttgttgacctggccatcaccatctgtattgtcttaaatactcttttcatggccatggagcactatccaatgacggaccatttcaataatgtgcttacagtaggaaacttggttttcactgggatctttacagcagaaatgtttctgaaaattattgccatggatccttactattatttccaagaaggctggaatatctttgacggttttattgtgacgcttagcctggtagaacttggactcgccaatgtggaaggattatctgttctccgttcatttcgattgctgcgagttttcaagttggcaaaatcttggccaacgttaaatatgctaataaagatcatcggcaattccgtgggggctctgggaaatttaaccctcgtcttggccatcatcgtcttcatttttgccgtggtcggcatgcagctctttggtaaaagctacaaagattgtgtctgcaagatcgccagtgattgtcaactcccacgctggcacatgaatgacttcttccactccttcctgattgtgttccgcgtgctgtgtggggagtggatagagaccatgtgggactgtatggaggttgctggtcaagccatgtgccttactgtcttcatgatggtcatggtgattggaaacctagtggtcctgaatctctttctggccttgcttctgagctcatttagtgcagacaaccttgcagccactgatgatgataatgaaatgaataatctccaaattgctgtggataggatgcacaaaggagtagcttatgtgaaaagaaaaatatatgaatttattcaacagtccttcattaggaaacaaaagattttagatgaaattaaaccacttgatgatctaaacaacaagaaagacagttgtatgtccaatcatacaacagaaattgggaaagatcttgactatcttaaagatgtaaatggaactacaagtggtataggaactggcagcagtgttgaaaaatacattattgatgaaagtgattacatgtcattcataaacaaccccagtcttactgtgactgtaccaattgctgtaggagaatctgactttgaaaatttaaacacggaagactttagtagtgaatcggatctggaagaaagcaaagagaaactgaatgaaagcagtagctcatcagaaggtagcactgtggacatcggcgcacctgtagaagaacagcccgtagtggaacctgaagaaactcttgaaccagaagcttgtttcactgaaggctgtgtacaaagattcaagtgttgtcaaatcaatgtggaagaaggcagaggaaaacaatggtggaacctgagaaggacgtgtttccgaatagttgaacataactggtttgagaccttcattgttttcatgattctccttagtagtggtgctctggcatttgaagatatatatattgatcagcgaaagacgattaagacgatgttggaatatgctgacaaggttttcacttacattttcattctggaaatgcttctaaaatgggtggcatatggctatcaaacatatttcaccaatgcctggtgttggctggacttcttaattgttgatgtttcattggtcagtttaacagcaaatgccttgggttactcagaacttggagccatcaaatctctcaggacactaagagctctgagacctctaagagccttatctcgatttgaagggatgagggtggttgtgaatgcccttttaggagcaattccatccatcatgaatgtgcttctggtttgtcttatattctggctaattttcagcatcatgggcgtaaatttgtttgctggcaaattctaccactgtattaacaccacaactggtgacaggtttgacatcgaagacgtgaataatcatactgattgcctaaaactaatagaaagaaatgagactgctcgatggaaaaatgtgaaagtaaactttgataatgtaggatttgggtatctctctttgcttcaagttgccacattcaaaggatggatggatataatgtatgcagcagttgattccagaaatgtggaactccagcctaagtatgaaaaaagtctgtacatgtatctttactttgttattttcatcatctttgggtccttcttcaccttgaacctgtttattggtgtcatcatagataatttcaaccagcagaaaaagaagtttggaggtcaagacatctttatgacagaagaacagaagaaatactataatgcaatgaaaaaattaggatcgaaaaaaccgcaaaagcctatacctcgaccaggaaacaaatttcaaggaatggtctttgacttcgtaaccagacaagtttttgacataagcatcatgattctcatctgtcttaacatggtcacaatgatggtggaaacagatgaccagagtgaatatgtgactaccattttgtcacgcatcaatctggtgttcattgtgctatttactggagagtgtgtactgaaactcatctctctacgccattattattttaccattggatggaatatttttgattttgtggttgtcattctctccattgtaggtatgtttcttgccgagctgatagaaaagtatttcgtgtcccctaccctgttccgagtgatccgtcttgctaggattggccgaatcctacgtctgatcaaaggagcaaaggggatccgcacgctgctctttgctttgatgatgtcccttcctgcgttgtttaacatcggcctcctactcttcctagtcatgttcatctacgccatctttgggatgtccaactttgcctatgttaagagggaagttgggatcgatgacatgttcaacgttgagacctttggcaacagcatgatctgcctattccaaattacaacctctgctggctgggatggattgctagcacccattctcaacagtaagccacccgactgtgaccctaataaagttaaccctggaagctcagttaagggagactgtgggaacccatctgttggaattttcttttttgtcagttacatcatcatatccttcctggttgtggtgaacatgtacatcgcggtcatcctggagaacttcagtgttgctactgaagaaagtgcagagcctctgagtgaggatgactttgagatgttctatgaggtttgggagaagtttgatcccgatgcaactcagttcatggaatttgaaaaattatctcagtttgcagctgcgcttgaaccgcctctcaatctgccacaaccaaacaaactccagctcattgccatggatttgcccatggtgagtggtgaccggatccactgtcttgatatcttatttgcttttacaaagcgggttctaggagagagtggagagatggatgctctacgaatacagatggaagagcgattcatggcttccaatccttccaaggtctcctatcagccaatcactactactttaaaacgaaaacaagaggaagtatctgctgtcattattcagcgtgcttacagacgccaccttttaaagcgaactgtaaaacaagcttcctttacgtacaataaaaacaaaatcaaaggtggggctaatcttcttataaaagaagacatgataattgacagaataaatgaaaactctattacagaaaaaactgatctgaccatgtccactgcagcttgtccaccttcctatgaccgggtgacaaagccaattgtggaaaaacatgagcaagaaggcaaagatgaaaaagccaaagggaaataaatgaaaataaataaaaataattgggtgacaaattgtttacagcctgtgaaggtgatgtatttttatcaacaggactcctttaggaggtcaatgccaaactgactgtttttacacaaatctccttaaggtcagtgcctacaataagacagtgaccccttgtcagcaaactgtgactctgtgtaaaggggagatgaccttgacaggaggttactgttctcactaccagctgacactgctgaagataagatgcacaatggctagtcagactgtagggaccagtttcaaggggtgcaaacctgtgattttggggttgtttaacatgaaacactttagtgtagtaattgtatccactgtttgcatttcaactgccacatttgtcacatttttatggaatctgttagtggattcatctttttgttaatccatgtgtttattatatgtgactatttttgtaaacgaagtttctgttgagaaataggctaaggacctctataacaggtatgccacctggggggtatggcaaccacatggccctcccagctacacaaagtcgtggtttgcatgagggcatgctgcacttagagatcatgcatgagaaaaagtcacaagaaaaacaaattcttaaatttcaccatatttctgggaggggtaattgggtgataagtggaggtgctttgttgatcttgttttgcgaaatccagcccctagaccaagtagattatttgtgggtaggccagtaaatcttagcaggtgcaaacttcattcaaatgtttggagtcataaatgttatgtttctttttgttgtattaaaaaaaaaacctgaatagtgaatattgcccctcaccctccaccgccagaagactgaattgaccaaaattactctttataaatttctgctttttcctgcactttgtttagccatctttgggctctcagcaaggttgacactgtatatgttaatgaaatgctatttattatgtaaatagtcattttaccctgtggtgcacgtttgagcaaacaaataatgacctaagcacagtatttattgcatcaaatatgtaccacaagaaatgtagagtgcaagctttacacaggtaataaaatgtattctgtaccatttatagatagtttggatgctatcaatgcatgtttatattaccatgctgctgtatctggtttctctcactgctcagaatctcatttatgagaaaccatatgtcagtggtaaagtcaaggaaattgttcaacagatctcatttatttaagtcattaagcaatagtttgcagcactttaacagctttttggttatttttacattttaagtggataacatatggtatatagccagactgtacagacatgtttaaaaaaacacactgcttaacctattaaatatgtgtttagaattttataagcaaatataaatactgtaaaaagtcactttattttatttttcagcattatgtacataaatatgaagaggaaattatcttcaggttgatatcacaatcacttttcttactttctgtccatagtactttttcatgaaagaaatttgctaaataagacatgaaaacaagactgggtagttgtagatttctgctttttaaattacatttgctaattttagattatttcacaattttaaggagcaaaataggttcacgattcatatccaaattatgctttgcaattggaaaagggtttaaaattttatttatatttctggtagtacctgtactaactgaattgaaggtagtgcttatgttatttttgttctttttttctgacttcggtttatgttttcatttctttggagtaatgctgctctagattgttctaaatagaatgtgggcttcataatttttttttccacaaaaacagagtagtcaacttatatagtcaattacatcaggacattttgtgtttcttacagaagcaaaccataggctcctcttttccttaaaactacttagataaactgtattcgtgaactgcatgctggaaaatgctactattatgctaaataatgctaaccaacatttaaaatgtgcaaaactaataaagattacattttttatttt

SEQ ID NO: 14 - DNA, 8381 bp, Homo sapiens
atactgcagaggtctctggtgcatgtgtgtatgtgtgcgtttgtgtgtgtttgtgtgtctgtgtgttctgccccagtgagactgcagcccttgtaaatactttgacaccttttgcaagaaggaatctgaacaattgcaactgaaggcacattgttatcatctcgtctttgggtgatgctgttcctcactgcagatggataattttccttttaatcaggaatttcatatgcagaataaatggtaattaaaatgtgcaggatgacaagatggagcaaacagtgcttgtaccaccaggacctgacagcttcaacttcttcaccagagaatctcttgcggctattgaaagacgcattgcagaagaaaaggcaaagaatcccaaaccagacaaaaaagatgacgacgaaaatggcccaaagccaaatagtgacttggaagctggaaagaaccttccatttatttatggagacattcctccagagatggtgtcagagcccctggaggacctggacccctactatatcaataagaaaacttttatagtattgaataaattgaaggccatcttccggttcagtgccacctctgccctgtacattttaactcccttcaatcctcttaggaaaatagctattaagattttggtacattcattattcagcatgctaattatgtgcactattttgacaaactgtgtgtttatgacaatgagtaaccctcctgattggacaaagaatgtagaatacaccttcacaggaatatatacttttgaatcacttataaaaattattgcaaggggattctgtttagaagattttactttccttcgggatccatggaactggctcgatttcactgtcattacatttgcgtacgtcacagagtttgtggacctgggcaatgtctcggcattgagaacattcagagttctccgagcattgaagacgatttcagtcattccaggcctgaaaaccattgtgggagccctgatccagtctgtgaagaagctctcagatgtaatgatcctgactgtgttctgtctgagcgtatttgctctaattgggctgcagctgttcatgggcaacctgaggaataaatgtatacaatggcctcccaccaatgcttccttggaggaacatagtatagaaaagaatataactgtgaattataatggtacacttataaatgaaactgtctttgagtttgactggaagtcatatattcaagattcaagatatcattatttcctggagggttttttagatgcactactatgtggaaatagctctgatgcaggccaatgtccagagggatatatgtgtgtgaaagctggtagaaatcccaattatggctacacaagctttgataccttcagttgggcttttttgtccttgtttcgactaatgactcaggacttctgggaaaatctttatcaactgacattacgtgctgctgggaaaacgtacatgatattttttgtattggtcattttcttgggctcattctacctaataaatttgatcctggctgtggtggccatggcctacgaggaacagaatcaggccaccttggaagaagcagaacagaaagaggccgaatttcagcagatgattgaacagcttaaaaagcaacaggaggcagctcagcaggcagcaacggcaactgcctcagaacattccagagagcccagtgcagcaggcaggctctcagacagctcatctgaagcctctaagttgagttccaagagtgctaaggaaagaagaaatcggaggaagaaaagaaaacagaaagagcagtctggtggggaagagaaagatgaggatgaattccaaaaatctgaatctgaggacagcatcaggaggaaaggttttcgcttctccattgaagggaaccgattgacatatgaaaagaggtactcctccccacaccagtctttgttgagcatccgtggctccctattttcaccaaggcgaaatagcagaacaagccttttcagctttagagggcgagcaaaggatgtgggatctgagaacgacttcgcagatgatgagcacagcacctttgaggataacgagagccgtagagattccttgtttgtgccccgacgacacggagagagacgcaacagcaacctgagtcagaccagtaggtcatcccggatgctggcagtgtttccagcgaatgggaagatgcacagcactgtggattgcaatggtgtggtttccttggttggtggaccttcagttcctacatcgcctgttggacagcttctgccagaggtgataatagataagccagctactgatgacaatggaacaaccactgaaactgaaatgagaaagagaaggtcaagttctttccacgtttccatggactttctagaagatccttcccaaaggcaacgagcaatgagtatagccagcattctaacaaatacagtagaagaacttgaagaatccaggcagaaatgcccaccctgttggtataaattttccaacatattcttaatctgggactgttctccatattggttaaaagtgaaacatgttgtcaacctggttgtgatggacccatttgttgacctggccatcaccatctgtattgtcttaaatactcttttcatggccatggagcactatccaatgacggaccatttcaataatgtgcttacagtaggaaacttggttttcactgggatctttacagcagaaatgtttctgaaaattattgccatggatccttactattatttccaagaaggctggaatatctttgacggttttattgtgacgcttagcctggtagaacttggactcgccaatgtggaaggattatctgttctccgttcatttcgattgctgcgagttttcaagttggcaaaatcttggccaacgttaaatatgctaataaagatcatcggcaattccgtgggggctctgggaaatttaaccctcgtcttggccatcatcgtcttcatttttgccgtggtcggcatgcagctctttggtaaaagctacaaagattgtgtctgcaagatcgccagtgattgtcaactcccacgctggcacatgaatgacttcttccactccttcctgattgtgttccgcgtgctgtgtggggagtggatagagaccatgtgggactgtatggaggttgctggtcaagccatgtgccttactgtcttcatgatggtcatggtgattggaaacctagtggtcctgaatctctttctggccttgcttctgagctcatttagtgcagacaaccttgcagccactgatgatgataatgaaatgaataatctccaaattgctgtggataggatgcacaaaggagtagcttatgtgaaaagaaaaatatatgaatttattcaacagtccttcattaggaaacaaaagattttagatgaaattaaaccacttgatgatctaaacaacaagaaagacagttgtatgtccaatcatacaacagaaattgggaaagatcttgactatcttaaagatgtaaatggaactacaagtggtataggaactggcagcagtgttgaaaaatacattattgatgaaagtgattacatgtcattcataaacaaccccagtcttactgtgactgtaccaattgctgtaggagaatctgactttgaaaatttaaacacggaagactttagtagtgaatcggatctggaagaaagcaaagagaaactgaatgaaagcagtagctcatcagaaggtagcactgtggacatcggcgcacctgtagaagaacagcccgtagtggaacctgaagaaactcttgaaccagaagcttgtttcactgaaggctgtgtacaaagattcaagtgttgtcaaatcaatgtggaagaaggcagaggaaaacaatggtggaacctgagaaggacgtgtttccgaatagttgaacataactggtttgagaccttcattgttttcatgattctccttagtagtggtgctctggcatttgaagatatatatattgatcagcgaaagacgattaagacgatgttggaatatgctgacaaggttttcacttacattttcattctggaaatgcttctaaaatgggtggcatatggctatcaaacatatttcaccaatgcctggtgttggctggacttcttaattgttgatgtttcattggtcagtttaacagcaaatgccttgggttactcagaacttggagccatcaaatctctcaggacactaagagctctgagacctctaagagccttatctcgatttgaagggatgagggtggttgtgaatgcccttttaggagcaattccatccatcatgaatgtgcttctggtttgtcttatattctggctaattttcagcatcatgggcgtaaatttgtttgctggcaaattctaccactgtattaacaccacaactggtgacaggtttgacatcgaagacgtgaataatcatactgattgcctaaaactaatagaaagaaatgagactgctcgatggaaaaatgtgaaagtaaactttgataatgtaggatttgggtatctctctttgcttcaagttgccacattcaaaggatggatggatataatgtatgcagcagttgattccagaaatgtggaactccagcctaagtatgaaaaaagtctgtacatgtatctttactttgttattttcatcatctttgggtccttcttcaccttgaacctgtttattggtgtcatcatagataatttcaaccagcagaaaaagaagtttggaggtcaagacatctttatgacagaagaacagaagaaatactataatgcaatgaaaaaattaggatcgaaaaaaccgcaaaagcctatacctcgaccaggaaacaaatttcaaggaatggtctttgacttcgtaaccagacaagtttttgacataagcatcatgattctcatctgtcttaacatggtcacaatgatggtggaaacagatgaccagagtgaatatgtgactaccattttgtcacgcatcaatctggtgttcattgtgctatttactggagagtgtgtactgaaactcatctctctacgccattattattttaccattggatggaatatttttgattttgtggttgtcattctctccattgtaggtatgtttcttgccgagctgatagaaaagtatttcgtgtcccctaccctgttccgagtgatccgtcttgctaggattggccgaatcctacgtctgatcaaaggagcaaaggggatccgcacgctgctctttgctttgatgatgtcccttcctgcgttgtttaacatcggcctcctactcttcctagtcatgttcatctacgccatctttgggatgtccaactttgcctatgttaagagggaagttgggatcgatgacatgttcaactttgagacctttggcaacagcatgatctgcctattccaaattacaacctctgctggctgggatggattgctagcacccattctcaacagtaagccacccgactgtgaccctaataaagttaaccctggaagctcagttaagggagactgtgggaacccatctgttggaattttcttttttgtcagttacatcatcatatccttcctggttgtggtgaacatgtacatcacggtcatcctggagaacttcagtgttgctactgaagaaagtgcagagcctctgagtgaggatgactttgagatgttctatgaggtttgggagaagtttgatcccgatgcaactcagttcatggaatttgaaaaattatctcagtttgcagctgcgcttgaaccgcctctcaatctgccacaaccaaacaaactccagctcattgccatggatttgcccatggtgagtggtgaccggatccactgtcttgatatcttatttgcttttacaaagcgggttctaggagagagtggagagatggatgctctacgaatacagatggaagagcgattcatggcttccaatccttccaaggtctcctatcagccaatcactactactttaaaacgaaaacaagaggaagtatctgctgtcattattcagcgtgcttacagacgccaccttttaaagcgaactgtaaaacaagcttcctttacgtacaataaaaacaaaatcaaaggtggggctaatcttcttataaaagaagacatgataattgacagaataaatgaaaactctattacagaaaaaactgatctgaccatgtccactgcagcttgtccaccttcctatgaccgggtgacaaagccaattgtggaaaaacatgagcaagaaggcaaagatgaaaaagccaaagggaaataaatgaaaataaataaaaataattgggtgacaaattgtttacagcctgtgaaggtgatgtatttttatcaacaggactcctttaggaggtcaatgccaaactgactgtttttacacaaatctccttaaggtcagtgcctacaataagacagtgaccccttgtcagcaaactgtgactctgtgtaaaggggagatgaccttgacaggaggttactgttctcactaccagctgacactgctgaagataagatgcacaatggctagtcagactgtagggaccagtttcaaggggtgcaaacctgtgattttggggttgtttaacatgaaacactttagtgtagtaattgtatccactgtttgcatttcaactgccacatttgtcacatttttatggaatctgttagtggattcatctttttgttaatccatgtgtttattatatgtgactatttttgtaaacgaagtttctgttgagaaataggctaaggacctctataacaggtatgccacctggggggtatggcaaccacatggccctcccagctacacaaagtcgtggtttgcatgagggcatgctgcacttagagatcatgcatgagaaaaagtcacaagaaaaacaaattcttaaatttcaccatatttctgggaggggtaattgggtgataagtggaggtgctttgttgatcttgttttgcgaaatccagcccctagaccaagtagattatttgtgggtaggccagtaaatcttagcaggtgcaaacttcattcaaatgtttggagtcataaatgttatgtttctttttgttgtattaaaaaaaaaacctgaatagtgaatattgcccctcaccctccaccgccagaagactgaattgaccaaaattactctttataaatttctgctttttcctgcactttgtttagccatctttgggctctcagcaaggttgacactgtatatgttaatgaaatgctatttattatgtaaatagtcattttaccctgtggtgcacgtttgagcaaacaaataatgacctaagcacagtatttattgcatcaaatatgtaccacaagaaatgtagagtgcaagctttacacaggtaataaaatgtattctgtaccatttatagatagtttggatgctatcaatgcatgtttatattaccatgctgctgtatctggtttctctcactgctcagaatctcatttatgagaaaccatatgtcagtggtaaagtcaaggaaattgttcaacagatctcatttatttaagtcattaagcaatagtttgcagcactttaacagctttttggttatttttacattttaagtggataacatatggtatatagccagactgtacagacatgtttaaaaaaacacactgcttaacctattaaatatgtgtttagaattttataagcaaatataaatactgtaaaaagtcactttattttatttttcagcattatgtacataaatatgaagaggaaattatcttcaggttgatatcacaatcacttttcttactttctgtccatagtactttttcatgaaagaaatttgctaaataagacatgaaaacaagactgggtagttgtagatttctgctttttaaattacatttgctaattttagattatttcacaattttaaggagcaaaataggttcacgattcatatccaaattatgctttgcaattggaaaagggtttaaaattttatttatatttctggtagtacctgtactaactgaattgaaggtagtgcttatgttatttttgttctttttttctgacttcggtttatgttttcatttctttggagtaatgctgctctagattgttctaaatagaatgtgggcttcataatttttttttccacaaaaacagagtagtcaacttatatagtcaattacatcaggacattttgtgtttcttacagaagcaaaccataggctcctcttttccttaaaactacttagataaactgtattcgtgaactgcatgctggaaaatgctactattatgctaaataatgctaaccaacatttaaaatgtgcaaaactaataaagattacattttttatttt

SEQ ID NO: 15 - DNA, 8380 bp, Homo sapiens
atactgcagaggtctctggtgcatgtgtgtatgtgtgcgtttgtgtgtgtttgtgtgtctgtgtgttctgccccagtgagactgcagcccttgtaaatactttgacaccttttgcaagaaggaatctgaacaattgcaactgaaggcacattgttatcatctcgtctttgggtgatgctgttcctcactgcagatggataattttccttttaatcaggaatttcatatgcagaataaatggtaattaaaatgtgcaggatgacaagatggagcaaacagtgcttgtaccaccaggacctgacagctcaacttcttcaccagagaatctcttgcggctattgaaagacgcattgcagaagaaaaggcaaagaatcccaaaccagacaaaaaagatgacgacgaaaatggcccaaagccaaatagtgacttggaagctggaaagaaccttccatttatttatggagacattcctccagagatggtgtcagagcccctggaggacctggacccctactatatcaataagaaaacttttatagtattgaataaattgaaggccatcttccggttcagtgccacctctgccctgtacattttaactcccttcaatcctcttaggaaaatagctattaagattttggtacattcattattcagcatgctaattatgtgcactattttgacaaactgtgtgtttatgacaatgagtaaccctcctgattggacaaagaatgtagaatacaccttcacaggaatatatacttttgaatcacttataaaaattattgcaaggggattctgtttagaagattttactttccttcgggatccatggaactggctcgatttcactgtcattacatttgcgtacgtcacagagtttgtggacctgggcaatgtctcggcattgagaacattcagagttctccgagcattgaagacgatttcagtcattccaggcctgaaaaccattgtgggagccctgatccagtctgtgaagaagctctcagatgtaatgatcctgactgtgttctgtctgagcgtatttgctctaattgggctgcagctgttcatgggcaacctgaggaataaatgtatacaatggcctcccaccaatgcttccttggaggaacatagtatagaaaagaatataactgtgaattataatggtacacttataaatgaaactgtctttgagtttgactggaagtcatatattcaagattcaagatatcattatttcctggagggttttttagatgcactactatgtggaaatagctctgatgcaggccaatgtccagagggatatatgtgtgtgaaagctggtagaaatcccaattatggctacacaagctttgataccttcagttgggcttttttgtccttgtttcgactaatgactcaggacttctgggaaaatctttatcaactgacattacgtgctgctgggaaaacgtacatgatattttttgtattggtcattttcttgggctcattctacctaataaatttgatcctggctgtggtggccatggcctacgaggaacagaatcaggccaccttggaagaagcagaacagaaagaggccgaatttcagcagatgattgaacagcttaaaaagcaacaggaggcagctcagcaggcagcaacggcaactgcctcagaacattccagagagcccagtgcagcaggcaggctctcagacagctcatctgaagcctctaagttgagttccaagagtgctaaggaaagaagaaatcggaggaagaaaagaaaacagaaagagcagtctggtggggaagagaaagatgaggatgaattccaaaaatctgaatctgaggacagcatcaggaggaaaggttttcgcttctccattgaagggaaccgattgacatatgaaaagaggtactcctccccacaccagtctttgttgagcatccgtggctccctattttcaccaaggcgaaatagcagaacaagccttttcagctttagagggcgagcaaaggatgtgggatctgagaacgacttcgcagatgatgagcacagcacctttgaggataacgagagccgtagagattccttgtttgtgccccgacgacacggagagagacgcaacagcaacctgagtcagaccagtaggtcatcccggatgctggcagtgtttccagcgaatgggaagatgcacagcactgtggattgcaatggtgtggtttccttggttggtggaccttcagttcctacatcgcctgttggacagcttctgccagaggtgataatagataagccagctactgatgacaatggaacaaccactgaaactgaaatgagaaagagaaggtcaagttctttccacgtttccatggactttctagaagatccttcccaaaggcaacgagcaatgagtatagccagcattctaacaaatacagtagaagaacttgaagaatccaggcagaaatgcccaccctgttggtataaattttccaacatattcttaatctgggactgttctccatattggttaaaagtgaaacatgttgtcaacctggttgtgatggacccatttgttgacctggccatcaccatctgtattgtcttaaatactcttttcatggccatggagcactatccaatgacggaccatttcaataatgtgcttacagtaggaaacttggttttcactgggatctttacagcagaaatgtttctgaaaattattgccatggatccttactattatttccaagaaggctggaatatctttgacggttttattgtgacgcttagcctggtagaacttggactcgccaatgtggaaggattatctgttctccgttcatttcgattgctgcgagttttcaagttggcaaaatcttggccaacgttaaatatgctaataaagatcatcggcaattccgtgggggctctgggaaatttaaccctcgtcttggccatcatcgtcttcatttttgccgtggtcggcatgcagctctttggtaaaagctacaaagattgtgtctgcaagatcgccagtgattgtcaactcccacgctggcacatgaatgacttcttccactccttcctgattgtgttccgcgtgctgtgtggggagtggatagagaccatgtgggactgtatggaggttgctggtcaagccatgtgccttactgtcttcatgatggtcatggtgattggaaacctagtggtcctgaatctctttctggccttgcttctgagctcatttagtgcagacaaccttgcagccactgatgatgataatgaaatgaataatctccaaattgctgtggataggatgcacaaaggagtagcttatgtgaaaagaaaaatatatgaatttattcaacagtccttcattaggaaacaaaagattttagatgaaattaaaccacttgatgatctaaacaacaagaaagacagttgtatgtccaatcatacaacagaaattgggaaagatcttgactatcttaaagatgtaaatggaactacaagtggtataggaactggcagcagtgttgaaaaatacattattgatgaaagtgattacatgtcattcataaacaaccccagtcttactgtgactgtaccaattgctgtaggagaatctgactttgaaaatttaaacacggaagactttagtagtgaatcggatctggaagaaagcaaagagaaactgaatgaaagcagtagctcatcagaaggtagcactgtggacatcggcgcacctgtagaagaacagcccgtagtggaacctgaagaaactcttgaaccagaagcttgtttcactgaaggctgtgtacaaagattcaagtgttgtcaaatcaatgtggaagaaggcagaggaaaacaatggtggaacctgagaaggacgtgtttccgaatagttgaacataactggtttgagaccttcattgttttcatgattctccttagtagtggtgctctggcatttgaagatatatatattgatcagcgaaagacgattaagacgatgttggaatatgctgacaaggttttcacttacattttcattctggaaatgcttctaaaatgggtggcatatggctatcaaacatatttcaccaatgcctggtgttggctggacttcttaattgttgatgtttcattggtcagtttaacagcaaatgccttgggttactcagaacttggagccatcaaatctctcaggacactaagagctctgagacctctaagagccttatctcgatttgaagggatgagggtggttgtgaatgcccttttaggagcaattccatccatcatgaatgtgcttctggtttgtcttatattctggctaattttcagcatcatgggcgtaaatttgtttgctggcaaattctaccactgtattaacaccacaactggtgacaggtttgacatcgaagacgtgaataatcatactgattgcctaaaactaatagaaagaaatgagactgctcgatggaaaaatgtgaaagtaaactttgataatgtaggatttgggtatctctctttgcttcaagttgccacattcaaaggatggatggatataatgtatgcagcagttgattccagaaatgtggaactccagcctaagtatgaaaaaagtctgtacatgtatctttactttgttattttcatcatctttgggtccttcttcaccttgaacctgtttattggtgtcatcatagataatttcaaccagcagaaaaagaagtttggaggtcaagacatctttatgacagaagaacagaagaaatactataatgcaatgaaaaaattaggatcgaaaaaaccgcaaaagcctatacctcgaccaggaaacaaatttcaaggaatggtctttgacttcgtaaccagacaagtttttgacataagcatcatgattctcatctgtcttaacatggtcacaatgatggtggaaacagatgaccagagtgaatatgtgactaccattttgtcacgcatcaatctggtgttcattgtgctatttactggagagtgtgtactgaaactcatctctctacgccattattattttaccattggatggaatatttttgattttgtggttgtcattctctccattgtaggtatgtttcttgccgagctgatagaaaagtatttcgtgtcccctaccctgttccgagtgatccgtcttgctaggattggccgaatcctacgtctgatcaaaggagcaaaggggatccgcacgctgctctttgctttgatgatgtcccttcctgcgttgtttaacatcggcctcctactcttcctagtcatgttcatctacgccatctttgggatgtccaactttgcctatgttaagagggaagttgggatcgatgacatgttcaactttgagacctttggcaacagcatgatctgcctattccaaattacaacctctgctggctgggatggattgctagcacccattctcaacagtaagccacccgactgtgaccctaataaagttaaccctggaagctcagttaagggagactgtgggaacccatctgttggaattttcttttttgtcagttacatcatcatatccttcctggttgtggtgaacatgtacatcgcggtcatcctggagaacttcagtgttgctactgaagaaagtgcagagcctctgagtgaggatgactttgagatgttctatgaggtttgggagaagtttgatcccgatgcaactcagttcatggaatttgaaaaattatctcagtttgcagctgcgcttgaaccgcctctcaatctgccacaaccaaacaaactccagctcattgccatggatttgcccatggtgagtggtgaccggatccactgtcttgatatcttatttgcttttacaaagcgggttctaggagagagtggagagatggatgctctacgaatacagatggaagagcgattcatggcttccaatccttccaaggtctcctatcagccaatcactactactttaaaacgaaaacaagaggaagtatctgctgtcattattcagcgtgcttacagacgccaccttttaaagcgaactgtaaaacaagcttcctttacgtacaataaaaacaaaatcaaaggtggggctaatcttcttataaaagaagacatgataattgacagaataaatgaaaactctattacagaaaaaactgatctgaccatgtccactgcagcttgtccaccttcctatgaccgggtgacaaagccaattgtggaaaaacatgagcaagaaggcaaagatgaaaaagccaaagggaaataaatgaaaataaataaaaataattgggtgacaaattgtttacagcctgtgaaggtgatgtatttttatcaacaggactcctttaggaggtcaatgccaaactgactgtttttacacaaatctccttaaggtcagtgcctacaataagacagtgaccccttgtcagcaaactgtgactctgtgtaaaggggagatgaccttgacaggaggttactgttctcactaccagctgacactgctgaagataagatgcacaatggctagtcagactgtagggaccagtttcaaggggtgcaaacctgtgattttggggttgtttaacatgaaacactttagtgtagtaattgtatccactgtttgcatttcaactgccacatttgtcacatttttatggaatctgttagtggattcatctttttgttaatccatgtgtttattatatgtgactatttttgtaaacgaagtttctgttgagaaataggctaaggacctctataacaggtatgccacctggggggtatggcaaccacatggccctcccagctacacaaagtcgtggtttgcatgagggcatgctgcacttagagatcatgcatgagaaaaagtcacaagaaaaacaaattcttaaatttcaccatatttctgggaggggtaattgggtgataagtggaggtgctttgttgatcttgttttgcgaaatccagcccctagaccaagtagattatttgtgggtaggccagtaaatcttagcaggtgcaaacttcattcaaatgtttggagtcataaatgttatgtttctttttgttgtattaaaaaaaaaacctgaatagtgaatattgcccctcaccctccaccgccagaagactgaattgaccaaaattactctttataaatttctgctttttcctgcactttgtttagccatctttgggctctcagcaaggttgacactgtatatgttaatgaaatgctatttattatgtaaatagtcattttaccctgtggtgcacgtttgagcaaacaaataatgacctaagcacagtatttattgcatcaaatatgtaccacaagaaatgtagagtgcaagctttacacaggtaataaaatgtattctgtaccatttatagatagtttggatgctatcaatgcatgtttatattaccatgctgctgtatctggtttctctcactgctcagaatctcatttatgagaaaccatatgtcagtggtaaagtcaaggaaattgttcaacagatctcatttatttaagtcattaagcaatagtttgcagcactttaacagctttttggttatttttacattttaagtggataacatatggtatatagccagactgtacagacatgtttaaaaaaacacactgcttaacctattaaatatgtgtttagaattttataagcaaatataaatactgtaaaaagtcactttattttatttttcagcattatgtacataaatatgaagaggaaattatcttcaggttgatatcacaatcacttttcttactttctgtccatagtactttttcatgaaagaaatttgctaaataagacatgaaaacaagactgggtagttgtagatttctgctttttaaattacatttgctaattttagattatttcacaattttaaggagcaaaataggttcacgattcatatccaaattatgctttgcaattggaaaagggtttaaaattttatttatatttctggtagtacctgtactaactgaattgaaggtagtgcttatgttatttttgttctttttttctgacttcggtttatgttttcatttctttggagtaatgctgctctagattgttctaaatagaatgtgggcttcataatttttttttccacaaaaacagagtagtcaacttatatagtcaattacatcaggacattttgtgtttcttacagaagcaaaccataggctcctcttttccttaaaactacttagataaactgtattcgtgaactgcatgctggaaaatgctactattatgctaaataatgctaaccaacatttaaaatgtgcaaaactaataaagattacattttttatttt

SEQ ID NO: 16 - DNA, 8388 bp, Homo sapiens
atactgcagaggtctctggtgcatgtgtgtatgtgtgcgtttgtgtgtgtttgtgtgtctgtgtgttctgccccagtgagactgcagcccttgtaaatactttgacaccttttgcaagaaggaatctgaacaattgcaactgaaggcacattgttatcatctcgtctttgggtgatgctgttcctcactgcagatggataattttccttttaatcaggaatttcatatgcagaataaatggtaattaaaatgtgcaggatgacaagatggagcaaacagtgcttgtaccaccaggacctgacagcttcaacttcttcaccagagaatctcttgcggctattgaaagacgcattgcagaagaaaaggcaaagaatcccaaaccagacaaaaaagatgacgacgaaaatggcccaaagccaaatagtgacttggaagctggaaagaaccttccatttatttatggagacattcctccagagatggtgtcagagcccctggaggacctggacccctactatatcaataagaaaacttttatagtattgaataaattgaaggccatcttccggttcagtgccacctctgccctgtacattttaactcccttcaatcctcttaggaaaatagctattaagattttggtacattcattattcagcatgctaattatgtgcactattttgacaaactgtgtgtttatgacaatgagtaaccctcctgattggacaaagaatgtagaatacaccttcacaggaatatatagtgaatccttttgaatcacttataaaaattattgcaaggggattctgtttagaagattttactttccttcgggatccatggaactggctcgatttcactgtcattacatttgcgtacgtcacagagtttgtggacctgggcaatgtctcggcattgagaacattcagagttctccgagcattgaagacgatttcagtcattccaggcctgaaaaccattgtgggagccctgatccagtctgtgaagaagctctcagatgtaatgatcctgactgtgttctgtctgagcgtatttgctctaattgggctgcagctgttcatgggcaacctgaggaataaatgtatacaatggcctcccaccaatgcttccttggaggaacatagtatagaaaagaatataactgtgaattataatggtacacttataaatgaaactgtctttgagtttgactggaagtcatatattcaagattcaagatatcattatttcctggagggttttttagatgcactactatgtggaaatagctctgatgcaggccaatgtccagagggatatatgtgtgtgaaagctggtagaaatcccaattatggctacacaagctttgataccttcagttgggcttttttgtccttgtttcgactaatgactcaggacttctgggaaaatctttatcaactgacattacgtgctgctgggaaaacgtacatgatattttttgtattggtcattttcttgggctcattctacctaataaatttgatcctggctgtggtggccatggcctacgaggaacagaatcaggccaccttggaagaagcagaacagaaagaggccgaatttcagcagatgattgaacagcttaaaaagcaacaggaggcagctcagcaggcagcaacggcaactgcctcagaacattccagagagcccagtgcagcaggcaggctctcagacagctcatctgaagcctctaagttgagttccaagagtgctaaggaaagaagaaatcggaggaagaaaagaaaacagaaagagcagtctggtggggaagagaaagatgaggatgaattccaaaaatctgaatctgaggacagcatcaggaggaaaggttttcgcttctccattgaagggaaccgattgacatatgaaaagaggtactcctccccacaccagtctttgttgagcatccgtggctccctattttcaccaaggcgaaatagcagaacaagccttttcagctttagagggcgagcaaaggatgtgggatctgagaacgacttcgcagatgatgagcacagcacctttgaggataacgagagccgtagagattccttgtttgtgccccgacgacacggagagagacgcaacagcaacctgagtcagaccagtaggtcatcccggatgctggcagtgtttccagcgaatgggaagatgcacagcactgtggattgcaatggtgtggtttccttggttggtggaccttcagttcctacatcgcctgttggacagcttctgccagaggtgataatagataagccagctactgatgacaatggaacaaccactgaaactgaaatgagaaagagaaggtcaagttctttccacgtttccatggactttctagaagatccttcccaaaggcaacgagcaatgagtatagccagcattctaacaaatacagtagaagaacttgaagaatccaggcagaaatgcccaccctgttggtataaattttccaacatattcttaatctgggactgttctccatattggttaaaagtgaaacatgttgtcaacctggttgtgatggacccatttgttgacctggccatcaccatctgtattgtcttaaatactcttttcatggccatggagcactatccaatgacggaccatttcaataatgtgcttacagtaggaaacttggttttcactgggatctttacagcagaaatgtttctgaaaattattgccatggatccttactattatttccaagaaggctggaatatctttgacggttttattgtgacgcttagcctggtagaacttggactcgccaatgtggaaggattatctgttctccgttcatttcgattgctgcgagttttcaagttggcaaaatcttggccaacgttaaatatgctaataaagatcatcggcaattccgtgggggctctgggaaatttaaccctcgtcttggccatcatcgtcttcatttttgccgtggtcggcatgcagctctttggtaaaagctacaaagattgtgtctgcaagatcgccagtgattgtcaactcccacgctggcacatgaatgacttcttccactccttcctgattgtgttccgcgtgctgtgtggggagtggatagagaccatgtgggactgtatggaggttgctggtcaagccatgtgccttactgtcttcatgatggtcatggtgattggaaacctagtggtcctgaatctctttctggccttgcttctgagctcatttagtgcagacaaccttgcagccactgatgatgataatgaaatgaataatctccaaattgctgtggataggatgcacaaaggagtagcttatgtgaaaagaaaaatatatgaatttattcaacagtccttcattaggaaacaaaagattttagatgaaattaaaccacttgatgatctaaacaacaagaaagacagttgtatgtccaatcatacaacagaaattgggaaagatcttgactatcttaaagatgtaaatggaactacaagtggtataggaactggcagcagtgttgaaaaatacattattgatgaaagtgattacatgtcattcataaacaaccccagtcttactgtgactgtaccaattgctgtaggagaatctgactttgaaaatttaaacacggaagactttagtagtgaatcggatctggaagaaagcaaagagaaactgaatgaaagcagtagctcatcagaaggtagcactgtggacatcggcgcacctgtagaagaacagcccgtagtggaacctgaagaaactcttgaaccagaagcttgtttcactgaaggctgtgtacaaagattcaagtgttgtcaaatcaatgtggaagaaggcagaggaaaacaatggtggaacctgagaaggacgtgtttccgaatagttgaacataactggtttgagaccttcattgttttcatgattctccttagtagtggtgctctggcatttgaagatatatatattgatcagcgaaagacgattaagacgatgttggaatatgctgacaaggttttcacttacattttcattctggaaatgcttctaaaatgggtggcatatggctatcaaacatatttcaccaatgcctggtgttggctggacttcttaattgttgatgtttcattggtcagtttaacagcaaatgccttgggttactcagaacttggagccatcaaatctctcaggacactaagagctctgagacctctaagagccttatctcgatttgaagggatgagggtggttgtgaatgcccttttaggagcaattccatccatcatgaatgtgcttctggtttgtcttatattctggctaattttcagcatcatgggcgtaaatttgtttgctggcaaattctaccactgtattaacaccacaactggtgacaggtttgacatcgaagacgtgaataatcatactgattgcctaaaactaatagaaagaaatgagactgctcgatggaaaaatgtgaaagtaaactttgataatgtaggatttgggtatctctctttgcttcaagttgccacattcaaaggatggatggatataatgtatgcagcagttgattccagaaatgtggaactccagcctaagtatgaaaaaagtctgtacatgtatctttactttgttattttcatcatctttgggtccttcttcaccttgaacctgtttattggtgtcatcatagataatttcaaccagcagaaaaagaagtttggaggtcaagacatctttatgacagaagaacagaagaaatactataatgcaatgaaaaaattaggatcgaaaaaaccgcaaaagcctatacctcgaccaggaaacaaatttcaaggaatggtctttgacttcgtaaccagacaagtttttgacataagcatcatgattctcatctgtcttaacatggtcacaatgatggtggaaacagatgaccagagtgaatatgtgactaccattttgtcacgcatcaatctggtgttcattgtgctatttactggagagtgtgtactgaaactcatctctctacgccattattattttaccattggatggaatatttttgattttgtggttgtcattctctccattgtaggtatgtttcttgccgagctgatagaaaagtatttcgtgtcccctaccctgttccgagtgatccgtcttgctaggattggccgaatcctacgtctgatcaaaggagcaaaggggatccgcacgctgctctttgctttgatgatgtcccttcctgcgttgtttaacatcggcctcctactcttcctagtcatgttcatctacgccatctttgggatgtccaactttgcctatgttaagagggaagttgggatcgatgacatgttcaactttgagacctttggcaacagcatgatctgcctattccaaattacaacctctgctggctgggatggattgctagcacccattctcaacagtaagccacccgactgtgaccctaataaagttaaccctggaagctcagttaagggagactgtgggaacccatctgttggaattttcttttttgtcagttacatcatcatatccttcctggttgtggtgaacatgtacatcgcggtcatcctggagaacttcagtgttgctactgaagaaagtgcagagcctctgagtgaggatgactttgagatgttctatgaggtttgggagaagtttgatcccgatgcaactcagttcatggaatttgaaaaattatctcagtttgcagctgcgcttgaaccgcctctcaatctgccacaaccaaacaaactccagctcattgccatggatttgcccatggtgagtggtgaccggatccactgtcttgatatcttatttgcttttacaaagcgggttctaggagagagtggagagatggatgctctacgaatacagatggaagagcgattcatggcttccaatccttccaaggtctcctatcagccaatcactactactttaaaacgaaaacaagaggaagtatctgctgtcattattcagcgtgcttacagacgccaccttttaaagcgaactgtaaaacaagcttcctttacgtacaataaaaacaaaatcaaaggtggggctaatcttcttataaaagaagacatgataattgacagaataaatgaaaactctattacagaaaaaactgatctgaccatgtccactgcagcttgtccaccttcctatgaccgggtgacaaagccaattgtggaaaaacatgagcaagaaggcaaagatgaaaaagccaaagggaaataaatgaaaataaataaaaataattgggtgacaaattgtttacagcctgtgaaggtgatgtatttttatcaacaggactcctttaggaggtcaatgccaaactgactgtttttacacaaatctccttaaggtcagtgcctacaataagacagtgaccccttgtcagcaaactgtgactctgtgtaaaggggagatgaccttgacaggaggttactgttctcactaccagctgacactgctgaagataagatgcacaatggctagtcagactgtagggaccagtttcaaggggtgcaaacctgtgattttggggttgtttaacatgaaacactttagtgtagtaattgtatccactgtttgcatttcaactgccacatttgtcacatttttatggaatctgttagtggattcatctttttgttaatccatgtgtttattatatgtgactatttttgtaaacgaagtttctgttgagaaataggctaaggacctctataacaggtatgccacctggggggtatggcaaccacatggccctcccagctacacaaagtcgtggtttgcatgagggcatgctgcacttagagatcatgcatgagaaaaagtcacaagaaaaacaaattcttaaatttcaccatatttctgggaggggtaattgggtgataagtggaggtgctttgttgatcttgttttgcgaaatccagcccctagaccaagtagattatttgtgggtaggccagtaaatcttagcaggtgcaaacttcattcaaatgtttggagtcataaatgttatgtttctttttgttgtattaaaaaaaaaacctgaatagtgaatattgcccctcaccctccaccgccagaagactgaattgaccaaaattactctttataaatttctgctttttcctgcactttgtttagccatctttgggctctcagcaaggttgacactgtatatgttaatgaaatgctatttattatgtaaatagtcattttaccctgtggtgcacgtttgagcaaacaaataatgacctaagcacagtatttattgcatcaaatatgtaccacaagaaatgtagagtgcaagctttacacaggtaataaaatgtattctgtaccatttatagatagtttggatgctatcaatgcatgtttatattaccatgctgctgtatctggtttctctcactgctcagaatctcatttatgagaaaccatatgtcagtggtaaagtcaaggaaattgttcaacagatctcatttatttaagtcattaagcaatagtttgcagcactttaacagctttttggttatttttacattttaagtggataacatatggtatatagccagactgtacagacatgtttaaaaaaacacactgcttaacctattaaatatgtgtttagaattttataagcaaatataaatactgtaaaaagtcactttattttatttttcagcattatgtacataaatatgaagaggaaattatcttcaggttgatatcacaatcacttttcttactttctgtccatagtactttttcatgaaagaaatttgctaaataagacatgaaaacaagactgggtagttgtagatttctgctttttaaattacatttgctaattttagattatttcacaattttaaggagcaaaataggttcacgattcatatccaaattatgctttgcaattggaaaagggtttaaaattttatttatatttctggtagtacctgtactaactgaattgaaggtagtgcttatgttatttttgttctttttttctgacttcggtttatgttttcatttctttggagtaatgctgctctagattgttctaaatagaatgtgggcttcataatttttttttccacaaaaacagagtagtcaacttatatagtcaattacatcaggacattttgtgtttcttacagaagcaaaccataggctcctcttttccttaaaactacttagataaactgtattcgtgaactgcatgctggaaaatgctactattatgctaaataatgctaaccaacatttaaaatgtgcaaaactaataaagattacattttttatttt

SEQ ID NO: 17 - DNA, 8380 bp, Homo sapiens
atactgcagaggtctctggtgcatgtgtgtatgtgtgcgtttgtgtgtgtttgtgtgtctgtgtgttctgccccagtgagactgcagcccttgtaaatactttgacaccttttgcaagaaggaatctgaacaattgcaactgaaggcacattgttatcatctcgtctttgggtgatgctgttcctcactgcagatggataattttccttttaatcaggaatttcatatgcagaataaatggtaattaaaatgtgcaggatgacaagatggagcaaacagtgcttgtaccaccaggacctgacagcttcaacttcttcaccagagaatctcttgcggctattgaaagacgcattgcagaagaaaaggcaaagaatcccaaaccagacaaaaaagatgacgacgaaaatggcccaaagccaaatagtgacttggaagctggaaagaaccttccatttatttatggagacattcctccagagatggtgtcagagcccctggaggacctggacccctactatatcaataagaaaacttttatagtattgaataaattgaaggccatcttccggttcagtgccacctctgccctgtacattttaactcccttcaatcctcttaggaaaatagctattaagattttggtacattcattattcagcatgctaattatgtgcactattttgacaaactgtgtgtttatgacaatgagtaaccctcctgattggacaaagaatgtagaatacaccttcacaggaatatatacttttgaatcacttataaaaattattgcaaggggattctgtttagaagattttactttccttcgggatccatggaactggctcgatttcactgtcattacatttgcgtacgtcacagagtttgtggacctgggcaatgtctcggcattgagaacattcagagttctccgagcattgaagacgatttcagtcattccaggcctgaaaaccattgtgggagccctgatccagtctgtgaagaagctctcagatgtaatgatcctgactgtgttctgtctgagcgtatttgctctaattgggctgcagctgttcatgggcaacctgaggaataaatgtatacaatggcctcccaccaatgcttccttggaggaacatagtatagaaaagaatataactgtgaattataatggtacacttataaatgaaactgtctttgagtttgactggaagtcatatattcaagattcaagatatcattatttcctggagggttttttagatgcactactatgtggaaatagctctgatgcaggccaatgtccagagggatatatgtgtgtgaaagctggtagaaatcccaattatggctacacaagctttgataccttcagttgggcttttttgtccttgtttcgactaatgactcaggacttctgggaaaatctttatcaactgacattacgtgctgctgggaaaacgtacatgatattttttgtattggtcattttcttgggctcattctacctaataaatttgatcctggctgtggtggccatggcctacgaggaacagaatcaggccaccttggaagaagcagaacagaaagaggccgaatttcagcagatgattgaacagcttaaaaagcaacaggaggcagctcagcaggcagcaacggcaactgcctcagaacattccagagagcccagtgcagcaggcaggctctcagacagctcatctgaagcctctaagttgagttccaagagtgctaaggaaagaagaaatcggaggaagaaaagaaaacagaaagagcagtctggtggggaagagaaagatgaggatgaattccaaaaatctgaatctgaggacagcatcaggaggaaaggttttcgcttctccattgaagggaaccgattgacatatgaaaagaggtactcctccccacaccagtctttgttgagcatccgtggctcctattttcaccaaggcgaaatagcagaacaagccttttcagctttagagggcgagcaaaggatgtgggatctgagaacgacttcgcagatgatgagcacagcacctttgaggataacgagagccgtagagattccttgtttgtgccccgacgacacggagagagacgcaacagcaacctgagtcagaccagtaggtcatcccggatgctggcagtgtttccagcgaatgggaagatgcacagcactgtggattgcaatggtgtggtttccttggttggtggaccttcagttcctacatcgcctgttggacagcttctgccagaggtgataatagataagccagctactgatgacaatggaacaaccactgaaactgaaatgagaaagagaaggtcaagttctttccacgtttccatggactttctagaagatccttcccaaaggcaacgagcaatgagtatagccagcattctaacaaatacagtagaagaacttgaagaatccaggcagaaatgcccaccctgttggtataaattttccaacatattcttaatctgggactgttctccatattggttaaaagtgaaacatgttgtcaacctggttgtgatggacccatttgttgacctggccatcaccatctgtattgtcttaaatactcttttcatggccatggagcactatccaatgacggaccatttcaataatgtgcttacagtaggaaacttggttttcactgggatctttacagcagaaatgtttctgaaaattattgccatggatccttactattatttccaagaaggctggaatatctttgacggttttattgtgacgcttagcctggtagaacttggactcgccaatgtggaaggattatctgttctccgttcatttcgattgctgcgagttttcaagttggcaaaatcttggccaacgttaaatatgctaataaagatcatcggcaattccgtgggggctctgggaaatttaaccctcgtcttggccatcatcgtcttcatttttgccgtggtcggcatgcagctctttggtaaaagctacaaagattgtgtctgcaagatcgccagtgattgtcaactcccacgctggcacatgaatgacttcttccactccttcctgattgtgttccgcgtgctgtgtggggagtggatagagaccatgtgggactgtatggaggttgctggtcaagccatgtgccttactgtcttcatgatggtcatggtgattggaaacctagtggtcctgaatctctttctggccttgcttctgagctcatttagtgcagacaaccttgcagccactgatgatgataatgaaatgaataatctccaaattgctgtggataggatgcacaaaggagtagcttatgtgaaaagaaaaatatatgaatttattcaacagtccttcattaggaaacaaaagattttagatgaaattaaaccacttgatgatctaaacaacaagaaagacagttgtatgtccaatcatacaacagaaattgggaaagatcttgactatcttaaagatgtaaatggaactacaagtggtataggaactggcagcagtgttgaaaaatacattattgatgaaagtgattacatgtcattcataaacaaccccagtcttactgtgactgtaccaattgctgtaggagaatctgactttgaaaatttaaacacggaagactttagtagtgaatcggatctggaagaaagcaaagagaaactgaatgaaagcagtagctcatcagaaggtagcactgtggacatcggcgcacctgtagaagaacagcccgtagtggaacctgaagaaactcttgaaccagaagcttgtttcactgaaggctgtgtacaaagattcaagtgttgtcaaatcaatgtggaagaaggcagaggaaaacaatggtggaacctgagaaggacgtgtttccgaatagttgaacataactggtttgagaccttcattgttttcatgattctccttagtagtggtgctctggcatttgaagatatatatattgatcagcgaaagacgattaagacgatgttggaatatgctgacaaggttttcacttacattttcattctggaaatgcttctaaaatgggtggcatatggctatcaaacatatttcaccaatgcctggtgttggctggacttcttaattgttgatgtttcattggtcagtttaacagcaaatgccttgggttactcagaacttggagccatcaaatctctcaggacactaagagctctgagacctctaagagccttatctcgatttgaagggatgagggtggttgtgaatgcccttttaggagcaattccatccatcatgaatgtgcttctggtttgtcttatattctggctaattttcagcatcatgggcgtaaatttgtttgctggcaaattctaccactgtattaacaccacaactggtgacaggtttgacatcgaagacgtgaataatcatactgattgcctaaaactaatagaaagaaatgagactgctcgatggaaaaatgtgaaagtaaactttgataatgtaggatttgggtatctctctttgcttcaagttgccacattcaaaggatggatggatataatgtatgcagcagttgattccagaaatgtggaactccagcctaagtatgaaaaaagtctgtacatgtatctttactttgttattttcatcatctttgggtccttcttcaccttgaacctgtttattggtgtcatcatagataatttcaaccagcagaaaaagaagtttggaggtcaagacatctttatgacagaagaacagaagaaatactataatgcaatgaaaaaattaggatcgaaaaaaccgcaaaagcctatacctcgaccaggaaacaaatttcaaggaatggtctttgacttcgtaaccagacaagtttttgacataagcatcatgattctcatctgtcttaacatggtcacaatgatggtggaaacagatgaccagagtgaatatgtgactaccattttgtcacgcatcaatctggtgttcattgtgctatttactggagagtgtgtactgaaactcatctctctacgccattattattttaccattggatggaatatttttgattttgtggttgtcattctctccattgtaggtatgtttcttgccgagctgatagaaaagtatttcgtgtcccctaccctgttccgagtgatccgtcttgctaggattggccgaatcctacgtctgatcaaaggagcaaaggggatccgcacgctgctctttgctttgatgatgtcccttcctgcgttgtttaacatcggcctcctactcttcctagtcatgttcatctacgccatctttgggatgtccaactttgcctatgttaagagggaagttgggatcgatgacatgttcaactttgagacctttggcaacagcatgatctgcctattccaaattacaacctctgctggctgggatggattgctagcacccattctcaacagtaagccacccgactgtgaccctaataaagttaaccctggaagctcagttaagggagactgtgggaacccatctgttggaattttcttttttgtcagttacatcatcatatccttcctggttgtggtgaacatgtacatcgcggtcatcctggagaacttcagtgttgctactgaagaaagtgcagagcctctgagtgaggatgactttgagatgttctatgaggtttgggagaagtttgatcccgatgcaactcagttcatggaatttgaaaaattatctcagtttgcagctgcgcttgaaccgcctctcaatctgccacaaccaaacaaactccagctcattgccatggatttgcccatggtgagtggtgaccggatccactgtcttgatatcttatttgcttttacaaagcgggttctaggagagagtggagagatggatgctctacgaatacagatggaagagcgattcatggcttccaatccttccaaggtctcctatcagccaatcactactactttaaaacgaaaacaagaggaagtatctgctgtcattattcagcgtgcttacagacgccaccttttaaagcgaactgtaaaacaagcttcctttacgtacaataaaaacaaaatcaaaggtggggctaatcttcttataaaagaagacatgataattgacagaataaatgaaaactctattacagaaaaaactgatctgaccatgtccactgcagcttgtccaccttcctatgaccgggtgacaaagccaattgtggaaaaacatgagcaagaaggcaaagatgaaaaagccaaagggaaataaatgaaaataaataaaaataattgggtgacaaattgtttacagcctgtgaaggtgatgtatttttatcaacaggactcctttaggaggtcaatgccaaactgactgtttttacacaaatctccttaaggtcagtgcctacaataagacagtgaccccttgtcagcaaactgtgactctgtgtaaaggggagatgaccttgacaggaggttactgttctcactaccagctgacactgctgaagataagatgcacaatggctagtcagactgtagggaccagtttcaaggggtgcaaacctgtgattttggggttgtttaacatgaaacactttagtgtagtaattgtatccactgtttgcatttcaactgccacatttgtcacatttttatggaatctgttagtggattcatctttttgttaatccatgtgtttattatatgtgactatttttgtaaacgaagtttctgttgagaaataggctaaggacctctataacaggtatgccacctggggggtatggcaaccacatggccctcccagctacacaaagtcgtggtttgcatgagggcatgctgcacttagagatcatgcatgagaaaaagtcacaagaaaaacaaattcttaaatttcaccatatttctgggaggggtaattgggtgataagtggaggtgctttgttgatcttgttttgcgaaatccagcccctagaccaagtagattatttgtgggtaggccagtaaatcttagcaggtgcaaacttcattcaaatgtttggagtcataaatgttatgtttctttttgttgtattaaaaaaaaaacctgaatagtgaatattgcccctcaccctccaccgccagaagactgaattgaccaaaattactctttataaatttctgctttttcctgcactttgtttagccatctttgggctctcagcaaggttgacactgtatatgttaatgaaatgctatttattatgtaaatagtcattttaccctgtggtgcacgtttgagcaaacaaataatgacctaagcacagtatttattgcatcaaatatgtaccacaagaaatgtagagtgcaagctttacacaggtaataaaatgtattctgtaccatttatagatagtttggatgctatcaatgcatgtttatattaccatgctgctgtatctggtttctctcactgctcagaatctcatttatgagaaaccatatgtcagtggtaaagtcaaggaaattgttcaacagatctcatttatttaagtcattaagcaatagtttgcagcactttaacagctttttggttatttttacattttaagtggataacatatggtatatagccagactgtacagacatgtttaaaaaaacacactgcttaacctattaaatatgtgtttagaattttataagcaaatataaatactgtaaaaagtcactttattttatttttcagcattatgtacataaatatgaagaggaaattatcttcaggttgatatcacaatcacttttcttactttctgtccatagtactttttcatgaaagaaatttgctaaataagacatgaaaacaagactgggtagttgtagatttctgctttttaaattacatttgctaattttagattatttcacaattttaaggagcaaaataggttcacgattcatatccaaattatgctttgcaattggaaaagggtttaaaattttatttatatttctggtagtacctgtactaactgaattgaaggtagtgcttatgttatttttgttctttttttctgacttcggtttatgttttcatttctttggagtaatgctgctctagattgttctaaatagaatgtgggcttcataatttttttttccacaaaaacagagtagtcaacttatatagtcaattacatcaggacattttgtgtttcttacagaagcaaaccataggctcctcttttccttaaaactacttagataaactgtattcgtgaactgcatgctggaaaatgctactattatgctaaataatgctaaccaacatttaaaatgtgcaaaactaataaagattacattttttatttt

SEQ ID NO: 18 - DNA, 8380 bp, Homo sapiens
atactgcagaggtctctggtgcatgtgtgtatgtgtgcgtttgtgtgtgtttgtgtgtctgtgtgttctgccccagtgagactgcagcccttgtaaatactttgacaccttttgcaagaaggaatctgaacaattgcaactgaaggcacattgttatcatctcgtctttgggtgatgctgttcctcactgcagatggataattttccttttaatcaggaatttcatatgcagaataaatggtaattaaaatgtgcaggatgacaagatggagcaaacagtgcttgtaccaccaggacctgacagcttcaacttcttcaccagagaatctcttgcggctattgaaagacgcattgcagaagaaaaggcaaagaatcccaaaccagacaaaaaagatgacgacgaaaatggcccaaagccaaatagtgacttggaagctggaaagaaccttccatttatttatggagacattcctccagagatggtgtcagagcccctggaggacctggacccctactatatcaataagaaaacttttatagtattgaataaattgaaggccatcttccggttcagtgccacctctgccctgtacattttaactcccttcaatcctcttaggaaaatagctattaagattttggtacattcattattcagcatgctaattatgtgcactattttgacaaactgtgtgtttatgacaatgagtaaccctcctgattggacaaagaatgtagaatacaccttcacaggaatatatacttttgaatcacttataaaaattattgcaaggggattctgtttagaagattttactttccttcgggatccatggaactggctcgatttcactgtcattacatttgcgtacgtcacagagtttgtggacctgggcaatgtctcggcattgagaacattcagagttctccgagcattgaagacgatttcagtcattccaggcctgaaaaccattgtgggagccctgatccagtctgtgaagaagctctcagatgtaatgatcctgactgtgttctgtctgagcgtatttgctctaattgggctgcagctgttcatgggcaacctgaggaataaatgtatacaatggcctcccaccaatgcttccttggaggaacatagtatagaaaagaatataactgtgaattataatggtacacttataaatgaaactgtctttgagtttgactggaagtcatatattcaagattcaagatatcattatttcctggagggttttttagatgcactactatgtggaaatagctctgatgcaggccaatgtccagagggatatatgtgtgtgaaagctggtagaaatcccaattatggctacacaagctttgataccttcagttgggcttttttgtccttgtttcgactaatgactcaggacttctgggaaaatctttatcaactgacattacgtgctgctgggaaaacgtacatgatattttttgtattggtcattttcttgggctcattctacctaataaatttgatcctggctgtggtggccatggcctacgaggaacagaatcaggccaccttggaagaagcagaacagaaagaggccgaatttcagcagatgattgaacagcttaaaaagcaacaggaggcagctcagcaggcagcaacggcaactgcctcagaacattccagagagcccagtgcagcaggcaggctctcagacagctcatctgaagcctctaagttgagttccaagagtgctaaggaaagaagaaatcggaggaagaaaagaaaacagaaagagcagtctggtggggaagagaaagatgaggatgaattccaaaaatctgaatctgaggacagcatcaggaggaaaggttttcgcttctccattgaagggaaccgattgacatatgaaaagaggtactcctccccacaccagtctttgttgagcatccgtggctccctattttcaccaaggcgaaatagcagaacaagccttttcagctttagagggcgagcaaaggatgtgggatctgagaacgacttcgcagatgatgagcacagcacctttgaggataacgagagccgtagagattccttgtttgtgccccgacgacacggagagagacgcaacagcaacctgagtcagaccagtaggtcatcccggatgctggcagtgtttccagcgaatgggaagatgcacagcactgtggattgcaatggtgtggtttccttggttggtggaccttcagttcctacatcgcctgttggacagcttctgccagaggtgataatagataagccagctactgatgacaatggaacaaccactgaaactgaaatgagaaagagaaggtcaagttctttccacgtttccatggactttctagaagatccttcccaaaggcaacgagcaatgagtatagccagcattctaacaaatacagtagaagaacttgaagaatccaggcagaaatgcccaccctgttggtataaattttccaacatattcttaatctgggactgttctccatattggttaaaagtgaaacatgttgtcaacctggttgtgatggacccatttgttgacctggccatcaccatctgtattgtcttaaatactcttttcatggccatggagcactatccaatgacggaccatttcaataatgtgcttacagtaggaaacttggttttcactgggatctttacagcagaaatgtttctgaaaattattgccatggatccttactattatttccaagaaggctggaatatctttgacggttttattgtgacgcttagcctggtagaacttggactcgccaatgtggaaggattatctgttctccgttcatttcgattgctgcgagttttcaagttggcaaaatcttggccaacgttaaatatgctaataaagatcatcggcaattccgtgggggctctgggaaatttaaccctcgtcttggccatcatcgtcttcatttttgccgtggtcggcatgcagctctttggtaaaagctacaaagattgtgtctgcaagatcgccagtgattgtcaactcccacgctggcacatgaatgacttcttccactccttcctgattgtgttccgcgtgctgtgtggggagtggatagagaccatgtgggactgtatggaggttgctggtcaagccatgtgccttactgtcttcatgatggtcatggtgattggaaacctagtggtcctgaatctctttctggccttgcttctgagctcatttagtgcagacaaccttgcagccactgatgatgataatgaaatgaataatctccaaattgctgtggataggatgcacaaaggagtagcttatgtgaaaagaaaaatatatgaatttattcaacagtccttcattaggaaacaaaagattttagatgaaattaaaccacttgatgatctaaacaacaagaaagacagttgtatgtccaatcatacaacagaaattgggaaagatcttgactatcttaagatgtaaatggaactacaagtggtataggaactggcagcagtgttgaaaaatacattattgatgaaagtgattacatgtcattcataaacaaccccagtcttactgtgactgtaccaattgctgtaggagaatctgactttgaaaatttaaacacggaagactttagtagtgaatcggatctggaagaaagcaaagagaaactgaatgaaagcagtagctcatcagaaggtagcactgtggacatcggcgcacctgtagaagaacagcccgtagtggaacctgaagaaactcttgaaccagaagcttgtttcactgaaggctgtgtacaaagattcaagtgttgtcaaatcaatgtggaagaaggcagaggaaaacaatggtggaacctgagaaggacgtgtttccgaatagttgaacataactggtttgagaccttcattgttttcatgattctccttagtagtggtgctctggcatttgaagatatatatattgatcagcgaaagacgattaagacgatgttggaatatgctgacaaggttttcacttacattttcattctggaaatgcttctaaaatgggtggcatatggctatcaaacatatttcaccaatgcctggtgttggctggacttcttaattgttgatgtttcattggtcagtttaacagcaaatgccttgggttactcagaacttggagccatcaaatctctcaggacactaagagctctgagacctctaagagccttatctcgatttgaagggatgagggtggttgtgaatgcccttttaggagcaattccatccatcatgaatgtgcttctggtttgtcttatattctggctaattttcagcatcatgggcgtaaatttgtttgctggcaaattctaccactgtattaacaccacaactggtgacaggtttgacatcgaagacgtgaataatcatactgattgcctaaaactaatagaaagaaatgagactgctcgatggaaaaatgtgaaagtaaactttgataatgtaggatttgggtatctctctttgcttcaagttgccacattcaaaggatggatggatataatgtatgcagcagttgattccagaaatgtggaactccagcctaagtatgaaaaaagtctgtacatgtatctttactttgttattttcatcatctttgggtccttcttcaccttgaacctgtttattggtgtcatcatagataatttcaaccagcagaaaaagaagtttggaggtcaagacatctttatgacagaagaacagaagaaatactataatgcaatgaaaaaattaggatcgaaaaaaccgcaaaagcctatacctcgaccaggaaacaaatttcaaggaatggtctttgacttcgtaaccagacaagtttttgacataagcatcatgattctcatctgtcttaacatggtcacaatgatggtggaaacagatgaccagagtgaatatgtgactaccattttgtcacgcatcaatctggtgttcattgtgctatttactggagagtgtgtactgaaactcatctctctacgccattattattttaccattggatggaatatttttgattttgtggttgtcattctctccattgtaggtatgtttcttgccgagctgatagaaaagtatttcgtgtcccctaccctgttccgagtgatccgtcttgctaggattggccgaatcctacgtctgatcaaaggagcaaaggggatccgcacgctgctctttgctttgatgatgtcccttcctgcgttgtttaacatcggcctcctactcttcctagtcatgttcatctacgccatctttgggatgtccaactttgcctatgttaagagggaagttgggatcgatgacatgttcaactttgagacctttggcaacagcatgatctgcctattccaaattacaacctctgctggctgggatggattgctagcacccattctcaacagtaagccacccgactgtgaccctaataaagttaaccctggaagctcagttaagggagactgtgggaacccatctgttggaattttcttttttgtcagttacatcatcatatccttcctggttgtggtgaacatgtacatcgcggtcatcctggagaacttcagtgttgctactgaagaaagtgcagagcctctgagtgaggatgactttgagatgttctatgaggtttgggagaagtttgatcccgatgcaactcagttcatggaatttgaaaaattatctcagtttgcagctgcgcttgaaccgcctctcaatctgccacaaccaaacaaactccagctcattgccatggatttgcccatggtgagtggtgaccggatccactgtcttgatatcttatttgcttttacaaagcgggttctaggagagagtggagagatggatgctctacgaatacagatggaagagcgattcatggcttccaatccttccaaggtctcctatcagccaatcactactactttaaaacgaaaacaagaggaagtatctgctgtcattattcagcgtgcttacagacgccaccttttaaagcgaactgtaaaacaagcttcctttacgtacaataaaaacaaaatcaaaggtggggctaatcttcttataaaagaagacatgataattgacagaataaatgaaaactctattacagaaaaaactgatctgaccatgtccactgcagcttgtccaccttcctatgaccgggtgacaaagccaattgtggaaaaacatgagcaagaaggcaaagatgaaaaagccaaagggaaataaatgaaaataaataaaaataattgggtgacaaattgtttacagcctgtgaaggtgatgtatttttatcaacaggactcctttaggaggtcaatgccaaactgactgtttttacacaaatctccttaaggtcagtgcctacaataagacagtgaccccttgtcagcaaactgtgactctgtgtaaaggggagatgaccttgacaggaggttactgttctcactaccagctgacactgctgaagataagatgcacaatggctagtcagactgtagggaccagtttcaaggggtgcaaacctgtgattttggggttgtttaacatgaaacactttagtgtagtaattgtatccactgtttgcatttcaactgccacatttgtcacatttttatggaatctgttagtggattcatctttttgttaatccatgtgtttattatatgtgactatttttgtaaacgaagtttctgttgagaaataggctaaggacctctataacaggtatgccacctggggggtatggcaaccacatggccctcccagctacacaaagtcgtggtttgcatgagggcatgctgcacttagagatcatgcatgagaaaaagtcacaagaaaaacaaattcttaaatttcaccatatttctgggaggggtaattgggtgataagtggaggtgctttgttgatcttgttttgcgaaatccagcccctagaccaagtagattatttgtgggtaggccagtaaatcttagcaggtgcaaacttcattcaaatgtttggagtcataaatgttatgtttctttttgttgtattaaaaaaaaaacctgaatagtgaatattgcccctcaccctccaccgccagaagactgaattgaccaaaattactctttataaatttctgctttttcctgcactttgtttagccatctttgggctctcagcaaggttgacactgtatatgttaatgaaatgctatttattatgtaaatagtcattttaccctgtggtgcacgtttgagcaaacaaataatgacctaagcacagtatttattgcatcaaatatgtaccacaagaaatgtagagtgcaagctttacacaggtaataaaatgtattctgtaccatttatagatagtttggatgctatcaatgcatgtttatattaccatgctgctgtatctggtttctctcactgctcagaatctcatttatgagaaaccatatgtcagtggtaaagtcaaggaaattgttcaacagatctcatttatttaagtcattaagcaatagtttgcagcactttaacagctttttggttatttttacattttaagtggataacatatggtatatagccagactgtacagacatgtttaaaaaaacacactgcttaacctattaaatatgtgtttagaattttataagcaaatataaatactgtaaaaagtcactttattttatttttcagcattatgtacataaatatgaagaggaaattatcttcaggttgatatcacaatcacttttcttactttctgtccatagtactttttcatgaaagaaatttgctaaataagacatgaaaacaagactgggtagttgtagatttctgctttttaaattacatttgctaattttagattatttcacaattttaaggagcaaaataggttcacgattcatatccaaattatgctttgcaattggaaaagggtttaaaattttatttatatttctggtagtacctgtactaactgaattgaaggtagtgcttatgttatttttgttctttttttctgacttcggtttatgttttcatttctttggagtaatgctgctctagattgttctaaatagaatgtgggcttcataatttttttttccacaaaaacagagtagtcaacttatatagtcaattacatcaggacattttgtgtttcttacagaagcaaaccataggctcctcttttccttaaaactacttagataaactgtattcgtgaactgcatgctggaaaatgctactattatgctaaataatgctaaccaacatttaaaatgtgcaaaactaataaagattacattttttatttt

SEQ ID NO: 19 - DNA, 8379 bp, Homo sapiens
atactgcagaggtctctggtgcatgtgtgtatgtgtgcgtttgtgtgtgtttgtgtgtctgtgtgttctgccccagtgagactgcagcccttgtaaatactttgacaccttttgcaagaaggaatctgaacaattgcaactgaaggcacattgttatcatctcgtctttgggtgatgctgttcctcactgcagatggataattttccttttaatcaggaatttcatatgcagaataaatggtaattaaaatgtgcaggatgacaagatggagcaaacagtgcttgtaccaccaggacctgacagcttcaacttcttcaccagagaatctcttgcggctattgaaagacgcattgcagaagaaaaggcaaagaatcccaaaccagacaaaaaagatgacgacgaaaatggcccaaagccaaatagtgacttggaagctggaaagaaccttccatttatttatggagacattcctccagagatggtgtcagagcccctggaggacctggacccctactatatcaataagaaaacttttatagtattgaataaattgaaggccatcttccggttcagtgccacctctgccctgtacattttaactcccttcaatcctcttaggaaaatagctattaagattttggtacattcattattcagcatgctaattatgtgcactattttgacaaactgtgtgtttatgacaatgagtaaccctcctgattggacaaagaatgtagaatacaccttcacaggaatatatacttttgaatcacttataaaaattattgcaaggggattctgtttagaagattttactttccttcgggatccatggaactggctcgatttcactgtcattacatttgcgtacgtcacagagtttgtggacctgggcaatgtctcggcattgagaacattcagagttctccgagcattgaagacgatttcagtcattccaggcctgaaaaccattgtgggagccctgatccagtctgtgaagaagctctcagatgtaatgatcctgactgtgttctgtctgagcgtatttgctctaattgggctgcagctgttcatgggcaacctgaggaataaatgtatacaatggcctcccaccaatgcttccttggaggaacatagtatagaaaagaatataactgtgaattataatggtacacttataaatgaaactgtctttgagtttgactggaagtcatatattcaagattcaagatatcattatttcctggagggttttttagatgcactactatgtggaaatagctctgatgcaggccaatgtccagagggatatatgtgtgtgaaagctggtagaaatcccaattatggctacacaagctttgataccttcagttgggcttttttgtccttgtttcgactaatgactcaggacttctgggaaaatctttatcaactgacattacgtgctgctgggaaaacgtacatgatattttttgtattggtcattttcttgggctcattctacctaataaatttgatcctggctgtggtggccatggcctacgaggaacagaatcaggccaccttggaagaagcagaacagaaagaggccgaatttcagcagatgattgaacagcttaaaaagcaacaggaggcagctcagcaggcagcaacggcaactgcctcagaacattccagagagcccagtgcagcaggcaggctctcagacagctcatctgaagcctctaagttgagttccaagagtgctaaggaaagaagaaatcggaggaagaaaagaaaacagaaagagcagtctggtggggaagagaaagatgaggatgaattccaaaaatctgaatctgaggacagcatcaggaggaaaggttttcgcttctccattgaagggaaccgattgacatatgaaaagaggtactcctccccacaccagtctttgttgagcatccgtggctccctattttcaccaaggcgaaatagcagaacaagccttttcagctttagagggcgagcaaaggatgtgggatctgagaacgacttcgcagatgatgagcacagcacctttgaggataacgagagccgtagagattccttgtttgtgccccgacgacacggagagagacgcaacagcaacctgagtcagaccagtaggtcatcccggatgctggcagtgtttccagcgaatgggaagatgcacagcactgtggattgcaatggtgtggtttccttggttggtggaccttcagttcctacatcgcctgttggacagcttctgccagaggtgataatagataagccagctactgatgacaatggaacaaccactgaaactgaaatgagaaagagaaggtcaagttctttccacgtttccatggactttctagaagatccttcccaaaggcaacgagcaatgagtatagccagcattctaacaaatacagtagaagaacttgaagaatccaggcagaaatgcccaccctgttggtataaattttccaacatattcttaatctgggactgttctccatattggttaaaagtgaaacatgttgtcaacctggttgtgatggacccatttgttgacctggccatcaccatctgtattgtcttaaatactcttttcatggccatggagcactatccaatgacggaccatttcaataatgtgcttacagtaggaaacttggttttcactgggatctttacagcagaaatgtttctgaaaattattgccatggatccttactattatttccaagaaggctggaatatctttgacggttttattgtgacgcttagcctggtagaacttggactcgccaatgtggaaggattatctgttctccgttcatttcgattgctgcgagttttcaagttggcaaaatcttggccaacgttaaatatgctaataaagatcatcggcaattccgtgggggctctgggaaatttaaccctcgtcttggccatcatcgtcttcatttttgccgtggtcggcatgcagctctttggtaaaagctacaaagattgtgtctgcaagatcgccagtgattgtcaactcccacgctggcacatgaatgacttcttccactccttcctgattgtgttccgcgtgctgtgtggggagtggatagagaccatgtgggactgtatggaggttgctggtcaagccatgtgccttactgtcttcatgatggtcatggtgattggaaacctagtggtcctgaatctctttctggccttgcttctgagctcatttagtgcagacaaccttgcagccactgatgatgataatgaaatgaataatctccaaattgctgtggataggatgcacaaaggagtagcttatgtgaaaagaaaaatatatgaatttattcaacagtccttcattaggaaacaaaagattttagatgaaattaaaccacttgatgatctaaacaacaagaaagacagttgtatgtccaatcatacaacagaaattgggaaagatcttgactatcttaaagatgtaaatggaactacaagtggtataggaactggcagcagtgttgaaaaatacattattgatgaaagtgattacatgtcattcataaacaaccccagtcttactgtgactgtaccaattgctgtaggagaatctgactttgaaaatttaaacacggaagactttagtagtgaatcggatctggaagaaagcaaagagaaactgaatgaaagcagtagctcatcagaaggtagcactgtggacatcggcgcacctgtagaagaacagcccgtagtggaacctgaagaaactcttgaaccagaagcttgtttcactgaaggctgtgtacagattcaagtgttgtcaaatcaatgtggaagaaggcagaggaaaacaatggtggaacctgagaaggacgtgtttccgaatagttgaacataactggtttgagaccttcattgttttcatgattctccttagtagtggtgctctggcatttgaagatatatatattgatcagcgaaagacgattaagacgatgttggaatatgctgacaaggttttcacttacattttcattctggaaatgcttctaaaatgggtggcatatggctatcaaacatatttcaccaatgcctggtgttggctggacttcttaattgttgatgtttcattggtcagtttaacagcaaatgccttgggttactcagaacttggagccatcaaatctctcaggacactaagagctctgagacctctaagagccttatctcgatttgaagggatgagggtggttgtgaatgcccttttaggagcaattccatccatcatgaatgtgcttctggtttgtcttatattctggctaattttcagcatcatgggcgtaaatttgtttgctggcaaattctaccactgtattaacaccacaactggtgacaggtttgacatcgaagacgtgaataatcatactgattgcctaaaactaatagaaagaaatgagactgctcgatggaaaaatgtgaaagtaaactttgataatgtaggatttgggtatctctctttgcttcaagttgccacattcaaaggatggatggatataatgtatgcagcagttgattccagaaatgtggaactccagcctaagtatgaaaaaagtctgtacatgtatctttactttgttattttcatcatctttgggtccttcttcaccttgaacctgtttattggtgtcatcatagataatttcaaccagcagaaaaagaagtttggaggtcaagacatctttatgacagaagaacagaagaaatactataatgcaatgaaaaaattaggatcgaaaaaaccgcaaaagcctatacctcgaccaggaaacaaatttcaaggaatggtctttgacttcgtaaccagacaagtttttgacataagcatcatgattctcatctgtcttaacatggtcacaatgatggtggaaacagatgaccagagtgaatatgtgactaccattttgtcacgcatcaatctggtgttcattgtgctatttactggagagtgtgtactgaaactcatctctctacgccattattattttaccattggatggaatatttttgattttgtggttgtcattctctccattgtaggtatgtttcttgccgagctgatagaaaagtatttcgtgtcccctaccctgttccgagtgatccgtcttgctaggattggccgaatcctacgtctgatcaaaggagcaaaggggatccgcacgctgctctttgctttgatgatgtcccttcctgcgttgtttaacatcggcctcctactcttcctagtcatgttcatctacgccatctttgggatgtccaactttgcctatgttaagagggaagttgggatcgatgacatgttcaactttgagacctttggcaacagcatgatctgcctattccaaattacaacctctgctggctgggatggattgctagcacccattctcaacagtaagccacccgactgtgaccctaataaagttaaccctggaagctcagttaagggagactgtgggaacccatctgttggaattttcttttttgtcagttacatcatcatatccttcctggttgtggtgaacatgtacatcgcggtcatcctggagaacttcagtgttgctactgaagaaagtgcagagcctctgagtgaggatgactttgagatgttctatgaggtttgggagaagtttgatcccgatgcaactcagttcatggaatttgaaaaattatctcagtttgcagctgcgcttgaaccgcctctcaatctgccacaaccaaacaaactccagctcattgccatggatttgcccatggtgagtggtgaccggatccactgtcttgatatcttatttgcttttacaaagcgggttctaggagagagtggagagatggatgctctacgaatacagatggaagagcgattcatggcttccaatccttccaaggtctcctatcagccaatcactactactttaaaacgaaaacaagaggaagtatctgctgtcattattcagcgtgcttacagacgccaccttttaaagcgaactgtaaaacaagcttcctttacgtacaataaaaacaaaatcaaaggtggggctaatcttcttataaaagaagacatgataattgacagaataaatgaaaactctattacagaaaaaactgatctgaccatgtccactgcagcttgtccaccttcctatgaccgggtgacaaagccaattgtggaaaaacatgagcaagaaggcaaagatgaaaaagccaaagggaaataaatgaaaataaataaaaataattgggtgacaaattgtttacagcctgtgaaggtgatgtatttttatcaacaggactcctttaggaggtcaatgccaaactgactgtttttacacaaatctccttaaggtcagtgcctacaataagacagtgaccccttgtcagcaaactgtgactctgtgtaaaggggagatgaccttgacaggaggttactgttctcactaccagctgacactgctgaagataagatgcacaatggctagtcagactgtagggaccagtttcaaggggtgcaaacctgtgattttggggttgtttaacatgaaacactttagtgtagtaattgtatccactgtttgcatttcaactgccacatttgtcacatttttatggaatctgttagtggattcatctttttgttaatccatgtgtttattatatgtgactatttttgtaaacgaagtttctgttgagaaataggctaaggacctctataacaggtatgccacctggggggtatggcaaccacatggccctcccagctacacaaagtcgtggtttgcatgagggcatgctgcacttagagatcatgcatgagaaaaagtcacaagaaaaacaaattcttaaatttcaccatatttctgggaggggtaattgggtgataagtggaggtgctttgttgatcttgttttgcgaaatccagcccctagaccaagtagattatttgtgggtaggccagtaaatcttagcaggtgcaaacttcattcaaatgtttggagtcataaatgttatgtttctttttgttgtattaaaaaaaaaacctgaatagtgaatattgcccctcaccctccaccgccagaagactgaattgaccaaaattactctttataaatttctgctttttcctgcactttgtttagccatctttgggctctcagcaaggttgacactgtatatgttaatgaaatgctatttattatgtaaatagtcattttaccctgtggtgcacgtttgagcaaacaaataatgacctaagcacagtatttattgcatcaaatatgtaccacaagaaatgtagagtgcaagctttacacaggtaataaaatgtattctgtaccatttatagatagtttggatgctatcaatgcatgtttatattaccatgctgctgtatctggtttctctcactgctcagaatctcatttatgagaaaccatatgtcagtggtaaagtcaaggaaattgttcaacagatctcatttatttaagtcattaagcaatagtttgcagcactttaacagctttttggttatttttacattttaagtggataacatatggtatatagccagactgtacagacatgtttaaaaaaacacactgcttaacctattaaatatgtgtttagaattttataagcaaatataaatactgtaaaaagtcactttattttatttttcagcattatgtacataaatatgaagaggaaattatcttcaggttgatatcacaatcacttttcttactttctgtccatagtactttttcatgaaagaaatttgctaaataagacatgaaaacaagactgggtagttgtagatttctgctttttaaattacatttgctaattttagattatttcacaattttaaggagcaaaataggttcacgattcatatccaaattatgctttgcaattggaaaagggtttaaaattttatttatatttctggtagtacctgtactaactgaattgaaggtagtgcttatgttatttttgttctttttttctgacttcggtttatgttttcatttctttggagtaatgctgctctagattgttctaaatagaatgtgggcttcataatttttttttccacaaaaacagagtagtcaacttatatagtcaattacatcaggacattttgtgtttcttacagaagcaaaccataggctcctcttttccttaaaactacttagataaactgtattcgtgaactgcatgctggaaaatgctactattatgctaaataatgctaaccaacatttaaaatgtgcaaaactaataaagattacattttttatttt

SEQ ID NO: 20 - DNA, 8380 bp, Homo sapiens
atactgcagaggtctctggtgcatgtgtgtatgtgtgcgtttgtgtgtgtttgtgtgtctgtgtgttctgccccagtgagactgcagcccttgtaaatactttgacaccttttgcaagaaggaatctgaacaattgcaactgaaggcacattgttatcatctcgtctttgggtgatgctgttcctcactgcagatggataattttccttttaatcaggaatttcatatgcagaataaatggtaattaaaatgtgcaggatgacaagatggagcaaacagtgcttgtaccaccaggacctgacagcttcaacttcttcaccagagaatctcttgcggctattgaaagacgcattgcagaagaaaaggcaaagaatcccaaaccagacaaaaaagatgacgacgaaaatggcccaaagccaaatagtgacttggaagctggaaagaaccttccatttatttatggagacattcctccagagatggtgtcagagcccctggaggacctggacccctactatatcaataagaaaacttttatagtattgaataaattgaaggccatcttccggttcagtgccacctctgccctgtacattttaactcccttcaatcctcttaggaaaatagctattaagattttggtacattcattattcagcatgctaattatgtgcactattttgacaaactgtgtgtttatgacaatgagtaaccctcctgattggacaaagaatgtagaatacaccttcacaggaatatatacttttgaatcacttataaaaattattgcaaggggattctgtttagaagattttactttccttcgggatccatggaactggctcgatttcactgtcattacatttgcgtacgtcacagagtttgtggacctgggcaatgtctcggcattgagaacattcagagttctccgagcattgaagacgatttcagtcattccaggcctgaaaaccattgtgggagccctgatccagtctgtgaagaagctctcagatgtaatgatcctgactgtgttctgtctgagcgtatttgctctaattgggctgcagctgttcatgggcaacctgaggaataaatgtatacaatggcctcccaccaatgcttccttggaggaacatagtatagaaaagaatataactgtgaattataatggtacacttataaatgaaactgtctttgagtttgactggaagtcatatattcaagattcaagatatcattatttcctggagggttttttagatgcactactatgtggaaatagctctgatgcaggccaatgtccagagggatatatgtgtgtgaaagctggtagaaatcccaattatggctacacaagctttgataccttcagttgggcttttttgtccttgtttcgactaatgactcaggacttctgggaaaatctttatcaactgacattacgtgctgctgggaaaacgtacatgatattttttgtattggtcattttcttgggctcattctacctaataaatttgatcctggctgtggtggccatggcctacgaggaacagaatcaggccaccttggaagaagcagaacagaaagaggccgaatttcagcagatgattgaacagcttaaaaagcaacaggaggcagctcagcaggcagcaacggcaactgcctcagaacattccagagagcccagtgcagcaggcaggctctcagacagctcatctgaagcctctaagttgagttccaagagtgctaaggaaagaagaaatcggaggaagaaaagaaaacagaaagagcagtctggtggggaagagaaagatgaggatgaattccaaaaatctgaatctgaggacagcatcaggaggaaaggttttcgcttctccattgaagggaaccgattgacatatgaaaagaggtactcctccccacaccagtctttgttgagcatccgtggctccctattttcaccaaggcgaaatagcagaacaagccttttcagctttagagggcgagcaaaggatgtgggatctgagaacgacttcgcagatgatgagcacagcacctttgaggataacgagagccgtagagattccttgtttgtgccccgacgacacggagagagacgcaacagcaacctgagtcagaccagtaggtcatcccggatgctggcagtgtttccagcgaatgggaagatgcacagcactgtggattgcaatggtgtggtttccttggttggtggaccttcagttcctacatcgcctgttggacagcttctgccagaggtgataatagataagccagctactgatgacaatggaacaaccactgaaactgaaatgagaaagagaaggtcaagttctttccacgtttccatggactttctagaagatccttcccaaaggcaacgagcaatgagtatagccagcattctaacaaatacagtagaagaacttgaagaatccaggcagaaatgcccaccctgttggtataaattttccaacatattcttaatctgggactgttctccatattggttaaaagtgaaacatgttgtcaacctggttgtgatggacccatttgttgacctggccatcaccatctgtattgtcttaaatactcttttcatggccatggagcactatccaatgacggaccatttcaataatgtgcttacagtaggaaacttggttttcactgggatctttacagcagaaatgtttctgaaaattattgccatggatccttactattatttccaagaaggctggaatatctttgacggttttattgtgacgcttagcctggtagaacttggactcgccaatgtggaaggattatctgttctccgttcatttcgattgctgcgagttttcaagttggcaaaatcttggccaacgttaaatatgctaataaagatcatcggcaattccgtgggggctctgggaaatttaaccctcgtcttggccatcatcgtcttcatttttgccgtggtcggcatgcagctctttggtaaaagctacaaagattgtgtctgcaagatcgccagtgattgtcaactcccacgctggcacatgaatgacttcttccactccttcctgattgtgttccgcgtgctgtgtggggagtggatagagaccatgtgggactgtatggaggttgctggtcaagccatgtgccttactgtcttcatgatggtcatggtgattggaaacctagtggtcctgaatctctttctggccttgcttctgagctcatttagtgcagacaaccttgcagccactgatgatgataatgaaatgaataatctccaaattgctgtggataggatgcacaaaggagtagcttatgtgaaaagaaaaatatatgaatttattcaacagtccttcattaggaaacaaaagattttagatgaaattaaaccacttgatgatctaaacaacaagaaagacagttgtatgtccaatcatacaacagaaattgggaaagatcttgactatcttaaagatgtaaatggaactacaagtggtataggaactggcagcagtgttgaaaaatacattattgatgaaagtgattacatgtcattcataaacaaccccagtcttactgtgactgtaccaattgctgtaggagaatctgactttgaaaatttaaacacggaagactttagtagtgaatcggatctggaagaaagcaaagagaaactgaatgaaagcagtagctcatcagaaggtagcactgtggacatcggcgcacctgtagaagaacagcccgtagtggaacctgaagaaactcttgaaccagaagcttgtttcactgaaggctgtgtacaaagattcaagtgttgtcaaatcaatgtggaagaaggcagaggaaaacaatggtggaacctgagaaggacgtgtttccgaatagttgaacataactggtttgagaccttcattgttttcatgattctccttagtagtggtgctctggcatttgaagatatatatattgatcagcgaaagacgattaagacgatgttggaatatgctgacaaggttttcacttacattttcattctggaaatgcttctaaaatgggtggcatatggctatcaaacatatttcaccaatgcctggtgttggctggacttcttaattgttgatgtttcattggtcagtttaacagcaaatgccttgggttactcagaacttggagccatcaaatctctcaggacactaagagctctgagacctctaagagccttatctcgatttgaagggatgagggtggttgtgaatgcccttttaggagcaattccatccatcatgaatgtgcttctggtttgcttatattctggctaattttcagcatcatgggcgtaaatttgtttgctggcaaattctaccactgtattaacaccacaactggtgacaggtttgacatcgaagacgtgaataatcatactgattgcctaaaactaatagaaagaaatgagactgctcgatggaaaaatgtgaaagtaaactttgataatgtaggatttgggtatctctctttgcttcaagttgccacattcaaaggatggatggatataatgtatgcagcagttgattccagaaatgtggaactccagcctaagtatgaaaaaagtctgtacatgtatctttactttgttattttcatcatctttgggtccttcttcaccttgaacctgtttattggtgtcatcatagataatttcaaccagcagaaaaagaagtttggaggtcaagacatctttatgacagaagaacagaagaaatactataatgcaatgaaaaaattaggatcgaaaaaaccgcaaaagcctatacctcgaccaggaaacaaatttcaaggaatggtctttgacttcgtaaccagacaagtttttgacataagcatcatgattctcatctgtcttaacatggtcacaatgatggtggaaacagatgaccagagtgaatatgtgactaccattttgtcacgcatcaatctggtgttcattgtgctatttactggagagtgtgtactgaaactcatctctctacgccattattattttaccattggatggaatatttttgattttgtggttgtcattctctccattgtaggtatgtttcttgccgagctgatagaaaagtatttcgtgtcccctaccctgttccgagtgatccgtcttgctaggattggccgaatcctacgtctgatcaaaggagcaaaggggatccgcacgctgctctttgctttgatgatgtcccttcctgcgttgtttaacatcggcctcctactcttcctagtcatgttcatctacgccatctttgggatgtccaactttgcctatgttaagagggaagttgggatcgatgacatgttcaactttgagacctttggcaacagcatgatctgcctattccaaattacaacctctgctggctgggatggattgctagcacccattctcaacagtaagccacccgactgtgaccctaataaagttaaccctggaagctcagttaagggagactgtgggaacccatctgttggaattttcttttttgtcagttacatcatcatatccttcctggttgtggtgaacatgtacatcgcggtcatcctggagaacttcagtgttgctactgaagaaagtgcagagcctctgagtgaggatgactttgagatgttctatgaggtttgggagaagtttgatcccgatgcaactcagttcatggaatttgaaaaattatctcagtttgcagctgcgcttgaaccgcctctcaatctgccacaaccaaacaaactccagctcattgccatggatttgcccatggtgagtggtgaccggatccactgtcttgatatcttatttgcttttacaaagcgggttctaggagagagtggagagatggatgctctacgaatacagatggaagagcgattcatggcttccaatccttccaaggtctcctatcagccaatcactactactttaaaacgaaaacaagaggaagtatctgctgtcattattcagcgtgcttacagacgccaccttttaaagcgaactgtaaaacaagcttcctttacgtacaataaaaacaaaatcaaaggtggggctaatcttcttataaaagaagacatgataattgacagaataaatgaaaactctattacagaaaaaactgatctgaccatgtccactgcagcttgtccaccttcctatgaccgggtgacaaagccaattgtggaaaaacatgagcaagaaggcaaagatgaaaaagccaaagggaaataaatgaaaataaataaaaataattgggtgacaaattgtttacagcctgtgaaggtgatgtatttttatcaacaggactcctttaggaggtcaatgccaaactgactgtttttacacaaatctccttaaggtcagtgcctacaataagacagtgaccccttgtcagcaaactgtgactctgtgtaaaggggagatgaccttgacaggaggttactgttctcactaccagctgacactgctgaagataagatgcacaatggctagtcagactgtagggaccagtttcaaggggtgcaaacctgtgattttggggttgtttaacatgaaacactttagtgtagtaattgtatccactgtttgcatttcaactgccacatttgtcacatttttatggaatctgttagtggattcatctttttgttaatccatgtgtttattatatgtgactatttttgtaaacgaagtttctgttgagaaataggctaaggacctctataacaggtatgccacctggggggtatggcaaccacatggccctcccagctacacaaagtcgtggtttgcatgagggcatgctgcacttagagatcatgcatgagaaaaagtcacaagaaaaacaaattcttaaatttcaccatatttctgggaggggtaattgggtgataagtggaggtgctttgttgatcttgttttgcgaaatccagcccctagaccaagtagattatttgtgggtaggccagtaaatcttagcaggtgcaaacttcattcaaatgtttggagtcataaatgttatgtttctttttgttgtattaaaaaaaaaacctgaatagtgaatattgcccctcaccctccaccgccagaagactgaattgaccaaaattactctttataaatttctgctttttcctgcactttgtttagccatctttgggctctcagcaaggttgacactgtatatgttaatgaaatgctatttattatgtaaatagtcattttaccctgtggtgcacgtttgagcaaacaaataatgacctaagcacagtatttattgcatcaaatatgtaccacaagaaatgtagagtgcaagctttacacaggtaataaaatgtattctgtaccatttatagatagtttggatgctatcaatgcatgtttatattaccatgctgctgtatctggtttctctcactgctcagaatctcatttatgagaaaccatatgtcagtggtaaagtcaaggaaattgttcaacagatctcatttatttaagtcattaagcaatagtttgcagcactttaacagctttttggttatttttacattttaagtggataacatatggtatatagccagactgtacagacatgtttaaaaaaacacactgcttaacctattaaatatgtgtttagaattttataagcaaatataaatactgtaaaaagtcactttattttatttttcagcattatgtacataaatatgaagaggaaattatcttcaggttgatatcacaatcacttttcttactttctgtccatagtactttttcatgaaagaaatttgctaaataagacatgaaaacaagactgggtagttgtagatttctgctttttaaattacatttgctaattttagattatttcacaattttaaggagcaaaataggttcacgattcatatccaaattatgctttgcaattggaaaagggtttaaaattttatttatatttctggtagtacctgtactaactgaattgaaggtagtgcttatgttatttttgttctttttttctgacttcggtttatgttttcatttctttggagtaatgctgctctagattgttctaaatagaatgtgggcttcataatttttttttccacaaaaacagagtagtcaacttatatagtcaattacatcaggacattttgtgtttcttacagaagcaaaccataggctcctcttttccttaaaactacttagataaactgtattcgtgaactgcatgctggaaaatgctactattatgctaaataatgctaaccaacatttaaaatgtgcaaaactaataaagattacattttttatttt

SEQ ID NO: 21 - DNA, 8380 bp, Homo sapiens
atactgcagaggtctctggtgcatgtgtgtatgtgtgcgtttgtgtgtgtttgtgtgtctgtgtgttctgccccagtgagactgcagcccttgtaaatactttgacaccttttgcaagaaggaatctgaacaattgcaactgaaggcacattgttatcatctcgtctttgggtgatgctgttcctcactgcagatggataattttccttttaatcaggaatttcatatgcagaataaatggtaattaaaatgtgcaggatgacaagatggagcaaacagtgcttgtaccaccaggacctgacagcttcaacttcttcaccagagaatctcttgcggctattgaaagacgcattgcagaagaaaaggcaaagaatcccaaaccagacaaaaaagatgacgacgaaaatggcccaaagccaaatagtgacttggaagctggaaagaaccttccatttatttatggagacattcctccagagatggtgtcagagcccctggaggacctggacccctactatatcaataagaaaacttttatagtattgaataaattgaaggccatcttccggttcagtgccacctctgccctgtacattttaactcccttcaatcctcttaggaaaatagctattaagattttggtacattcattattcagcatgctaattatgtgcactattttgacaaactgtgtgtttatgacaatgagtaaccctcctgattggacaaagaatgtagaatacaccttcacaggaatatatacttttgaatcacttataaaaattattgcaaggggattctgtttagaagattttactttccttcgggatccatggaactggctcgatttcactgtcattacatttgcgtacgtcacagagtttgtggacctgggcaatgtctcggcattgagaacattcagagttctccgagcattgaagacgatttcagtcattccaggcctgaaaaccattgtgggagccctgatccagtctgtgaagaagctctcagatgtaatgatcctgactgtgttctgtctgagcgtatttgctctaattgggctgcagctgttcatgggcaacctgaggaataaatgtatacaatggcctcccaccaatgcttccttggaggaacatagtatagaaaagaatataactgtgaattataatggtacacttataaatgaaactgtctttgagtttgactggaagtcatatattcaagattcaagatatcattatttcctggagggttttttagatgcactactatgtggaaatagctctgatgcaggccaatgtccagagggatatatgtgtgtgaaagctggtagaaatcccaattatggctacacaagctttgataccttcagttgggcttttttgtccttgtttcgactaatgactcaggacttctgggaaaatctttatcaactgacattacgtgctgctgggaaaacgtacatgatattttttgtattggtcattttcttgggctcattctacctaataaatttgatcctggctgtggtggccatggcctacgaggaacagaatcaggccaccttggaagaagcagaacagaaagaggccgaatttcagcagatgattgaacagcttaaaaagcaacaggaggcagctcagcaggcagcaacggcaactgcctcagaacattccagagagcccagtgcagcaggcaggctctcagacagctcatctgaagcctctaagttgagttccaagagtgctaaggaaagaagaaatcggaggaagaaaagaaaacagaaagagcagtctggtggggaagagaaagatgaggatgaattccaaaaatctgaatctgaggacagcatcaggaggaaaggttttcgcttctccattgaagggaaccgattgacatatgaaaagaggtactcctccccacaccagtctttgttgagcatccgtggctccctattttcaccaaggcgaaatagcagaacaagccttttcagctttagagggcgagcaaaggatgtgggatctgagaacgacttcgcagatgatgagcacagcacctttgaggataacgagagccgtagagattccttgtttgtgccccgacgacacggagagagacgcaacagcaacctgagtcagaccagtaggtcatcccggatgctggcagtgtttccagcgaatgggaagatgcacagcactgtggattgcaatggtgtggtttccttggttggtggaccttcagttcctacatcgcctgttggacagcttctgccagaggtgataatagataagccagctactgatgacaatggaacaaccactgaaactgaaatgagaaagagaaggtcaagttctttccacgtttccatggactttctagaagatccttcccaaaggcaacgagcaatgagtatagccagcattctaacaaatacagtagaagaacttgaagaatccaggcagaaatgcccaccctgttggtataaattttccaacatattcttaatctgggactgttctccatattggttaaaagtgaaacatgttgtcaacctggttgtgatggacccatttgttgacctggccatcaccatctgtattgtcttaaatactcttttcatggccatggagcactatccaatgacggaccatttcaataatgtgcttacagtaggaaacttggttttcactgggatctttacagcagaaatgtttctgaaaattattgccatggatccttactattatttccaagaaggctggaatatctttgacggttttattgtgacgcttagcctggtagaacttggactcgccaatgtggaaggattatctgttctccgttcatttcgattgctgcgagttttcaagttggcaaaatcttggccaacgttaaatatgctaataaagatcatcggcaattccgtgggggctctgggaaatttaaccctcgtcttggccatcatcgtcttcatttttgccgtggtcggcatgcagctctttggtaaaagctacaaagattgtgtctgcaagatcgccagtgattgtcaactcccacgctggcacatgaatgacttcttccactccttcctgattgtgttccgcgtgctgtgtggggagtggatagagaccatgtgggactgtatggaggttgctggtcaagccatgtgccttactgtcttcatgatggtcatggtgattggaaacctagtggtcctgaatctctttctggccttgcttctgagctcatttagtgcagacaaccttgcagccactgatgatgataatgaaatgaataatctccaaattgctgtggataggatgcacaaaggagtagcttatgtgaaaagaaaaatatatgaatttattcaacagtccttcattaggaaacaaaagattttagatgaaattaaaccacttgatgatctaaacaacaagaaagacagttgtatgtccaatcatacaacagaaattgggaaagatcttgactatcttaaagatgtaaatggaactacaagtggtataggaactggcagcagtgttgaaaaatacattattgatgaaagtgattacatgtcattcataaacaaccccagtcttactgtgactgtaccaattgctgtaggagaatctgactttgaaaatttaaacacggaagactttagtagtgaatcggatctggaagaaagcaaagagaaactgaatgaaagcagtagctcatcagaaggtagcactgtggacatcggcgcacctgtagaagaacagcccgtagtggaacctgaagaaactcttgaaccagaagcttgtttcactgaaggctgtgtacaaagattcaagtgttgtcaaatcaatgtggaagaaggcagaggaaaacaatggtggaacctgagaaggacgtgtttccgaatagttgaacataactggtttgagaccttcattgttttcatgattctccttagtagtggtgctctggcatttgaagatatatatattgatcagcgaaagacgattaagacgatgttggaatatgctgacaaggttttcacttacattttcattctggaaatgcttctaaaatgggtggcatatggctatcaaacatatttcaccaatgcctggtgttggctggacttcttaattgttgatgtttcattggtcagtttaacagcaaatgccttgggttactcagaacttggagccatcaaatctctcaggacactaagagctctgagacctctaagagccttatctcgatttgaagggatgagggtggttgtgaatgcccttttaggagcaattccatccatcatgaatgtgcttctggtttgtcttatattctggctaattttcagcatcatgggcgtaaatttgtttgctggcaaattctaccactgtattaacaccacaactggtgacaggtttgacatcgaagacgtgaataatcatactgattgcctaaaactaatagaaagaaatgagactgctcgatggaaaaatgtgaaagtaaactttgataatgtaggatttgggtatctctctttgcttcaagttgccacattcaaaggatggatggatataatgtatgcagcagttgattccagaaatgtggaactccagcctaagtatgaaaaaagtctgtacatgtatctttactttgttattttcatcatctttgggtccttcttcaccttgaacctgtttattggtgtcatcatagataatttcaaccagcagaaaaagaagtttggaggtcaagacatctttatgacagaagaacagaagaaatactatatgcaatgaaaaaattaggatcgaaaaaaccgcaaaagcctatacctcgaccaggaaacaaatttcaaggaatggtctttgacttcgtaaccagacaagtttttgacataagcatcatgattctcatctgtcttaacatggtcacaatgatggtggaaacagatgaccagagtgaatatgtgactaccattttgtcacgcatcaatctggtgttcattgtgctatttactggagagtgtgtactgaaactcatctctctacgccattattattttaccattggatggaatatttttgattttgtggttgtcattctctccattgtaggtatgtttcttgccgagctgatagaaaagtatttcgtgtcccctaccctgttccgagtgatccgtcttgctaggattggccgaatcctacgtctgatcaaaggagcaaaggggatccgcacgctgctctttgctttgatgatgtcccttcctgcgttgtttaacatcggcctcctactcttcctagtcatgttcatctacgccatctttgggatgtccaactttgcctatgttaagagggaagttgggatcgatgacatgttcaactttgagacctttggcaacagcatgatctgcctattccaaattacaacctctgctggctgggatggattgctagcacccattctcaacagtaagccacccgactgtgaccctaataaagttaaccctggaagctcagttaagggagactgtgggaacccatctgttggaattttcttttttgtcagttacatcatcatatccttcctggttgtggtgaacatgtacatcgcggtcatcctggagaacttcagtgttgctactgaagaaagtgcagagcctctgagtgaggatgactttgagatgttctatgaggtttgggagaagtttgatcccgatgcaactcagttcatggaatttgaaaaattatctcagtttgcagctgcgcttgaaccgcctctcaatctgccacaaccaaacaaactccagctcattgccatggatttgcccatggtgagtggtgaccggatccactgtcttgatatcttatttgcttttacaaagcgggttctaggagagagtggagagatggatgctctacgaatacagatggaagagcgattcatggcttccaatccttccaaggtctcctatcagccaatcactactactttaaaacgaaaacaagaggaagtatctgctgtcattattcagcgtgcttacagacgccaccttttaaagcgaactgtaaaacaagcttcctttacgtacaataaaaacaaaatcaaaggtggggctaatcttcttataaaagaagacatgataattgacagaataaatgaaaactctattacagaaaaaactgatctgaccatgtccactgcagcttgtccaccttcctatgaccgggtgacaaagccaattgtggaaaaacatgagcaagaaggcaaagatgaaaaagccaaagggaaataaatgaaaataaataaaaataattgggtgacaaattgtttacagcctgtgaaggtgatgtatttttatcaacaggactcctttaggaggtcaatgccaaactgactgtttttacacaaatctccttaaggtcagtgcctacaataagacagtgaccccttgtcagcaaactgtgactctgtgtaaaggggagatgaccttgacaggaggttactgttctcactaccagctgacactgctgaagataagatgcacaatggctagtcagactgtagggaccagtttcaaggggtgcaaacctgtgattttggggttgtttaacatgaaacactttagtgtagtaattgtatccactgtttgcatttcaactgccacatttgtcacatttttatggaatctgttagtggattcatctttttgttaatccatgtgtttattatatgtgactatttttgtaaacgaagtttctgttgagaaataggctaaggacctctataacaggtatgccacctggggggtatggcaaccacatggccctcccagctacacaaagtcgtggtttgcatgagggcatgctgcacttagagatcatgcatgagaaaaagtcacaagaaaaacaaattcttaaatttcaccatatttctgggaggggtaattgggtgataagtggaggtgctttgttgatcttgttttgcgaaatccagcccctagaccaagtagattatttgtgggtaggccagtaaatcttagcaggtgcaaacttcattcaaatgtttggagtcataaatgttatgtttctttttgttgtattaaaaaaaaaacctgaatagtgaatattgcccctcaccctccaccgccagaagactgaattgaccaaaattactctttataaatttctgctttttcctgcactttgtttagccatctttgggctctcagcaaggttgacactgtatatgttaatgaaatgctatttattatgtaaatagtcattttaccctgtggtgcacgtttgagcaaacaaataatgacctaagcacagtatttattgcatcaaatatgtaccacaagaaatgtagagtgcaagctttacacaggtaataaaatgtattctgtaccatttatagatagtttggatgctatcaatgcatgtttatattaccatgctgctgtatctggtttctctcactgctcagaatctcatttatgagaaaccatatgtcagtggtaaagtcaaggaaattgttcaacagatctcatttatttaagtcattaagcaatagtttgcagcactttaacagctttttggttatttttacattttaagtggataacatatggtatatagccagactgtacagacatgtttaaaaaaacacactgcttaacctattaaatatgtgtttagaattttataagcaaatataaatactgtaaaaagtcactttattttatttttcagcattatgtacataaatatgaagaggaaattatcttcaggttgatatcacaatcacttttcttactttctgtccatagtactttttcatgaaagaaatttgctaaataagacatgaaaacaagactgggtagttgtagatttctgctttttaaattacatttgctaattttagattatttcacaattttaaggagcaaaataggttcacgattcatatccaaattatgctttgcaattggaaaagggtttaaaattttatttatatttctggtagtacctgtactaactgaattgaaggtagtgcttatgttatttttgttctttttttctgacttcggtttatgttttcatttctttggagtaatgctgctctagattgttctaaatagaatgtgggcttcataatttttttttccacaaaaacagagtagtcaacttatatagtcaattacatcaggacattttgtgtttcttacagaagcaaaccataggctcctcttttccttaaaactacttagataaactgtattcgtgaactgcatgctggaaaatgctactattatgctaaataatgctaaccaacatttaaaatgtgcaaaactaataaagattacattttttatttt

SEQ ID NO: 22 - DNA, 8381 bp, Homo sapiens
atactgcagaggtctctggtgcatgtgtgtatgtgtgcgtttgtgtgtgtttgtgtgtctgtgtgttctgccccagtgagactgcagcccttgtaaatactttgacaccttttgcaagaaggaatctgaacaattgcaactgaaggcacattgttatcatctcgtctttgggtgatgctgttcctcactgcagatggataattttccttttaatcaggaatttcatatgcagaataaatggtaattaaaatgtgcaggatgacaagatggagcaaacagtgcttgtaccaccaggacctgacagcttcaacttcttcaccagagaatctcttgcggctattgaaagacgcattgcagaagaaaaggcaaagaatcccaaaccagacaaaaaagatgacgacgaaaatggcccaaagccaaatagtgacttggaagctggaaagaaccttccatttatttatggagacattcctccagagatggtgtcagagcccctggaggacctggacccctactatatcaataagaaaacttttatagtattgaataaattgaaggccatcttccggttcagtgccacctctgccctgtacattttaactcccttcaatcctcttaggaaaatagctattaagattttggtacattcattattcagcatgctaattatgtgcactattttgacaaactgtgtgtttatgacaatgagtaaccctcctgattggacaaagaatgtagaatacaccttcacaggaatatatacttttgaatcacttataaaaattattgcaaggggattctgtttagaagattttactttccttcgggatccatggaactggctcgatttcactgtcattacatttgcgtacgtcacagagtttgtggacctgggcaatgtctcggcattgagaacattcagagttctccgagcattgaagacgatttcagtcattccaggcctgaaaaccattgtgggagccctgatccagtctgtgaagaagctctcagatgtaatgatcctgactgtgttctgtctgagcgtatttgctctaattgggctgcagctgttcatgggcaacctgaggaataaatgtatacaatggcctcccaccaatgcttccttggaggaacatagtatagaaaagaatataactgtgaattataatggtacacttataaatgaaactgtctttgagtttgactggaagtcatatattcaagattcaagatatcattatttcctggagggttttttagatgcactactatgtggaaatagctctgatgcaggccaatgtccagagggatatatgtgtgtgaaagctggtagaaatcccaattatggctacacaagctttgataccttcagttgggcttttttgtccttgtttcgactaatgactcaggacttctgggaaaatctttatcaactgacattacgtgctgctgggaaaacgtacatgatattttttgtattggtcattttcttgggctcattctacctaataaatttgatcctggctgtggtggccatggcctacgaggaacagaatcaggccaccttggaagaagcagaacagaaagaggccgaatttcagcagatgattgaacagcttaaaaagcaacaggaggcagctcagcaggcagcaacggcaactgcctcagaacattccagagagcccagtgcagcaggcaggctctcagacagctcatctgaagcctctaagttgagttccaagagtgctaaggaaagaagaaatcggaggaagaaaagaaaacagaaagagcagtctggtggggaagagaaagatgaggatgaattccaaaaatctgaatctgaggacagcatcaggaggaaaggttttcgcttctccattgaagggaaccgattgacatatgaaaagaggtactcctccccacaccagtctttgttgagcatccgtggctccctattttcaccaaggcgaaatagcagaacaagccttttcagctttagagggcgagcaaaggatgtgggatctgagaacgacttcgcagatgatgagcacagcacctttgaggataacgagagccgtagagattccttgtttgtgccccgacgacacggagagagacgcaacagcaacctgagtcagaccagtaggtcatcccggatgctggcagtgtttccagcgaatgggaagatgcacagcactgtggattgcaatggtgtggtttccttggttggtggaccttcagttcctacatcgcctgttggacagcttctgccagaggtgataatagataagccagctactgatgacaatggaacaaccactgaaactgaaatgagaaagagaaggtcaagttctttccacgtttccatggactttctagaagatccttcccaaaggcaacgagcaatgagtatagccagcattctaacaaatacagtagaagaacttgaagaatccaggcagaaatgcccaccctgttggtataaattttccaacatattcttaatctgggactgttctccatattggttaaaagtgaaacatgttgtcaacctggttgtgatggacccatttgttgacctggccatcaccatctgtattgtcttaaatactcttttcatggccatggagcactatccaatgacggaccatttcaataatgtgcttacagtaggaaacttggttttcactgggatctttacagcagaaatgtttctgaaaattattgccatggatccttactattatttccaagaaggctggaatatctttgacggttttattgtgacgcttagcctggtagaacttggactcgccaatgtggaaggattatctgttctccgttcatttcgattgctgcgagttttcaagttggcaaaatcttggccaacgttaaatatgctaataaagatcatcggcaattccgtgggggctctgggaaatttaaccctcgtcttggccatcatcgtcttcatttttgccgtggtcggcatgcagctctttggtaaaagctacaaagattgtgtctgcaagatcgccagtgattgtcaactcccacgctggcacatgaatgacttcttccactccttcctgattgtgttccgcgtgctgtgtggggagtggatagagaccatgtgggactgtatggaggttgctggtcaagccatgtgccttactgtcttcatgatggtcatggtgattggaaacctagtggtcctgaatctctttctggccttgcttctgagctcatttagtgcagacaaccttgcagccactgatgatgataattaaatgaataatctccaaattgctgtggataggatgcacaaaggagtagcttatgtgaaaagaaaaatatatgaatttattcaacagtccttcattaggaaacaaaagattttagatgaaattaaaccacttgatgatctaaacaacaagaaagacagttgtatgtccaatcatacaacagaaattgggaaagatcttgactatcttaaagatgtaaatggaactacaagtggtataggaactggcagcagtgttgaaaaatacattattgatgaaagtgattacatgtcattcataaacaaccccagtcttactgtgactgtaccaattgctgtaggagaatctgactttgaaaatttaaacacggaagactttagtagtgaatcggatctggaagaaagcaaagagaaactgaatgaaagcagtagctcatcagaaggtagcactgtggacatcggcgcacctgtagaagaacagcccgtagtggaacctgaagaaactcttgaaccagaagcttgtttcactgaaggctgtgtacaaagattcaagtgttgtcaaatcaatgtggaagaaggcagaggaaaacaatggtggaacctgagaaggacgtgtttccgaatagttgaacataactggtttgagaccttcattgttttcatgattctccttagtagtggtgctctggcatttgaagatatatatattgatcagcgaaagacgattaagacgatgttggaatatgctgacaaggttttcacttacattttcattctggaaatgcttctaaaatgggtggcatatggctatcaaacatatttcaccaatgcctggtgttggctggacttcttaattgttgatgtttcattggtcagtttaacagcaaatgccttgggttactcagaacttggagccatcaaatctctcaggacactaagagctctgagacctctaagagccttatctcgatttgaagggatgagggtggttgtgaatgcccttttaggagcaattccatccatcatgaatgtgcttctggtttgtcttatattctggctaattttcagcatcatgggcgtaaatttgtttgctggcaaattctaccactgtattaacaccacaactggtgacaggtttgacatcgaagacgtgaataatcatactgattgcctaaaactaatagaaagaaatgagactgctcgatggaaaaatgtgaaagtaaactttgataatgtaggatttgggtatctctctttgcttcaagttgccacattcaaaggatggatggatataatgtatgcagcagttgattccagaaatgtggaactccagcctaagtatgaaaaaagtctgtacatgtatctttactttgttattttcatcatctttgggtccttcttcaccttgaacctgtttattggtgtcatcatagataatttcaaccagcagaaaaagaagtttggaggtcaagacatctttatgacagaagaacagaagaaatactataatgcaatgaaaaaattaggatcgaaaaaaccgcaaaagcctatacctcgaccaggaaacaaatttcaaggaatggtctttgacttcgtaaccagacaagtttttgacataagcatcatgattctcatctgtcttaacatggtcacaatgatggtggaaacagatgaccagagtgaatatgtgactaccattttgtcacgcatcaatctggtgttcattgtgctatttactggagagtgtgtactgaaactcatctctctacgccattattattttaccattggatggaatatttttgattttgtggttgtcattctctccattgtaggtatgtttcttgccgagctgatagaaaagtatttcgtgtcccctaccctgttccgagtgatccgtcttgctaggattggccgaatcctacgtctgatcaaaggagcaaaggggatccgcacgctgctctttgctttgatgatgtcccttcctgcgttgtttaacatcggcctcctactcttcctagtcatgttcatctacgccatctttgggatgtccaactttgcctatgttaagagggaagttgggatcgatgacatgttcaactttgagacctttggcaacagcatgatctgcctattccaaattacaacctctgctggctgggatggattgctagcacccattctcaacagtaagccacccgactgtgaccctaataaagttaaccctggaagctcagttaagggagactgtgggaacccatctgttggaattttcttttttgtcagttacatcatcatatccttcctggttgtggtgaacatgtacatcgcggtcatcctggagaacttcagtgttgctactgaagaaagtgcagagcctctgagtgaggatgactttgagatgttctatgaggtttgggagaagtttgatcccgatgcaactcagttcatggaatttgaaaaattatctcagtttgcagctgcgcttgaaccgcctctcaatctgccacaaccaaacaaactccagctcattgccatggatttgcccatggtgagtggtgaccggatccactgtcttgatatcttatttgcttttacaaagcgggttctaggagagagtggagagatggatgctctacgaatacagatggaagagcgattcatggcttccaatccttccaaggtctcctatcagccaatcactactactttaaaacgaaaacaagaggaagtatctgctgtcattattcagcgtgcttacagacgccaccttttaaagcgaactgtaaaacaagcttcctttacgtacaataaaaacaaaatcaaaggtggggctaatcttcttataaaagaagacatgataattgacagaataaatgaaaactctattacagaaaaaactgatctgaccatgtccactgcagcttgtccaccttcctatgaccgggtgacaaagccaattgtggaaaaacatgagcaagaaggcaaagatgaaaaagccaaagggaaataaatgaaaataaataaaaataattgggtgacaaattgtttacagcctgtgaaggtgatgtatttttatcaacaggactcctttaggaggtcaatgccaaactgactgtttttacacaaatctccttaaggtcagtgcctacaataagacagtgaccccttgtcagcaaactgtgactctgtgtaaaggggagatgaccttgacaggaggttactgttctcactaccagctgacactgctgaagataagatgcacaatggctagtcagactgtagggaccagtttcaaggggtgcaaacctgtgattttggggttgtttaacatgaaacactttagtgtagtaattgtatccactgtttgcatttcaactgccacatttgtcacatttttatggaatctgttagtggattcatctttttgttaatccatgtgtttattatatgtgactatttttgtaaacgaagtttctgttgagaaataggctaaggacctctataacaggtatgccacctggggggtatggcaaccacatggccctcccagctacacaaagtcgtggtttgcatgagggcatgctgcacttagagatcatgcatgagaaaaagtcacaagaaaaacaaattcttaaatttcaccatatttctgggaggggtaattgggtgataagtggaggtgctttgttgatcttgttttgcgaaatccagcccctagaccaagtagattatttgtgggtaggccagtaaatcttagcaggtgcaaacttcattcaaatgtttggagtcataaatgttatgtttctttttgttgtattaaaaaaaaaacctgaatagtgaatattgcccctcaccctccaccgccagaagactgaattgaccaaaattactctttataaatttctgctttttcctgcactttgtttagccatctttgggctctcagcaaggttgacactgtatatgttaatgaaatgctatttattatgtaaatagtcattttaccctgtggtgcacgtttgagcaaacaaataatgacctaagcacagtatttattgcatcaaatatgtaccacaagaaatgtagagtgcaagctttacacaggtaataaaatgtattctgtaccatttatagatagtttggatgctatcaatgcatgtttatattaccatgctgctgtatctggtttctctcactgctcagaatctcatttatgagaaaccatatgtcagtggtaaagtcaaggaaattgttcaacagatctcatttatttaagtcattaagcaatagtttgcagcactttaacagctttttggttatttttacattttaagtggataacatatggtatatagccagactgtacagacatgtttaaaaaaacacactgcttaacctattaaatatgtgtttagaattttataagcaaatataaatactgtaaaaagtcactttattttatttttcagcattatgtacataaatatgaagaggaaattatcttcaggttgatatcacaatcacttttcttactttctgtccatagtactttttcatgaaagaaatttgctaaataagacatgaaaacaagactgggtagttgtagatttctgctttttaaattacatttgctaattttagattatttcacaattttaaggagcaaaataggttcacgattcatatccaaattatgctttgcaattggaaaagggtttaaaattttatttatatttctggtagtacctgtactaactgaattgaaggtagtgcttatgttatttttgttctttttttctgacttcggtttatgttttcatttctttggagtaatgctgctctagattgttctaaatagaatgtgggcttcataatttttttttccacaaaaacagagtagtcaacttatatagtcaattacatcaggacattttgtgtttcttacagaagcaaaccataggctcctcttttccttaaaactacttagataaactgtattcgtgaactgcatgctggaaaatgctactattatgctaaataatgctaaccaacatttaaaatgtgcaaaactaataaagattacattttttatttt

SEQ ID NO: 23 - DNA, 8381 bp, Homo sapiens
atactgcagaggtctctggtgcatgtgtgtatgtgtgcgtttgtgtgtgtttgtgtgtctgtgtgttctgccccagtgagactgcagcccttgtaaatactttgacaccttttgcaagaaggaatctgaacaattgcaactgaaggcacattgttatcatctcgtctttgggtgatgctgttcctcactgcagatggataattttccttttaatcaggaatttcatatgcagaataaatggtaattaaaatgtgcaggatgacaagatggagcaaacagtgcttgtaccaccaggacctgacagcttcaacttcttcaccagagaatctcttgcggctattgaaagacgcattgcagaagaaaaggcaaagaatcccaaaccagacaaaaaagatgacgacgaaaatggcccaaagccaaatagtgacttggaagctggaaagaaccttccatttatttatggagacattcctccagagatggtgtcagagcccctggaggacctggacccctactatatcaataagaaaacttttatagtattgaataaattgaaggccatcttccggttcagtgccacctctgccctgtacattttaactcccttcaatcctcttaggaaaatagctattaagattttggtacattcattattcagcatgctaattatgtgcactattttgacaaactgtgtgtttatgacaatgagtaaccctcctgattggacaaagaatgtagaatacaccttcacaggaatatatacttttgaatcacttataaaaattattgcaaggggattctgtttagaagattttactttccttcgggatccatggaactggctcgatttcactgtcattacatttgcgtacgtcacagagtttgtggacctgggcaatgtctcggcattgagaacattcagagttctccgagcattgaagacgatttcagtcattccaggcctgaaaaccattgtgggagccctgatccagtctgtgaagaagctctcagatgtaatgatcctgactgtgttctgtctgagcgtatttgctctaattgggctgcagctgttcatgggcaacctgaggaataaatgtatacaatggcctcccaccaatgcttccttggaggaacatagtatagaaaagaatataactgtgaattataatggtacacttataaatgaaactgtctttgagtttgactggaagtcatatattcaagattcaagatatcattatttcctggagggttttttagatgcactactatgtggaaatagctctgatgcaggccaatgtccagagggatatatgtgtgtgaaagctggtagaaatcccaattatggctacacaagctttgataccttcagttgggcttttttgtccttgtttcgactaatgactcaggacttctgggaaaatctttatcaactgacattacgtgctgctgggaaaacgtacatgatattttttgtattggtcattttcttgggctcattctacctaataaatttgatcctggctgtggtggccatggcctacgaggaacagaatcaggccaccttggaagaagcagaacagaaagaggccgaatttcagcagatgattgaacagcttaaaaagcaacaggaggcagctcagcaggcagcaacggcaactgcctcagaacattccagagagcccagtgcagcaggcaggctctcagacagctcatctgaagcctctaagttgagttccaagagtgctaaggaaagaagaaatcggaggaagaaaagaaaacagaaagagcagtctggtggggaagagaaagatgaggatgaattccaaaaatctgaatctgaggacagcatcaggaggaaaggttttcgcttctccattgaagggaaccgattgacatatgaaaagaggtactcctccccacaccagtctttgttgagcatccgtggctccctattttcaccaaggcgaaatagcagaacaagccttttcagctttagagggcgagcaaaggatgtgggatctgagaacgacttcgcagatgatgagcacagcacctttgaggataacgagagccgtagagattccttgtttgtgccccgacgacacggagagagacgcaacagcaacctgagtcagaccagtaggtcatcccggatgctggcagtgtttccagcgaatgggaagatgcacagcactgtggattgcaatggtgtggtttccttggttggtggaccttcagttcctacatcgcctgttggacagcttctgccagaggtgataatagataagccagctactgatgacaatggaacaaccactgaaactgaaatgagaaagagaaggtcaagttctttccacgtttccatggactttctagaagatccttcccaaaggcaacgagcaatgagtatagccagcattctaacaaatacagtagaagaacttgaagaatccaggcagaaatgcccaccctgttggtataaattttccaacatattcttaatctgggactgttctccatattggttaaaagtgaaacatgttgtcaacctggttgtgatggacccatttgttgacctggccatcaccatctgtattgtcttaaatactcttttcatggccatggagcactatccaatgacggaccatttcaataatgtgcttacagtaggaaacttggttttcactgggatctttacagcagaaatgtttctgaaaattattgccatggatccttactattatttccaagaaggctggaatatctttgacggttttattgtgacgcttagcctggtagaacttggactcgccaatgtggaaggattatctgttctccgttcatttcgattgctgcgagttttcaagttggcaaaatcttggccaacgttaaatatgctaataaagatcatcggcaattccgtgggggctctgggaaatttaaccctcgtcttggccatcatcgtcttcatttttgccgtggtcggcatgcagctctttggtaaaagctacaaagattgtgtctgcaagatcgccagtgattgtcaactcccacgctggcacatgaatgacttcttccactccttcctgattgtgttccgcgtgctgtgtggggagtggatagagaccatgtgggactgtatggaggttgctggtcaagccatgtgccttactgtcttcatgatggtcatggtgattggaaacctagtggtcctgaatctctttctggccttgcttctgagctcatttagtgcagacaaccttgcagccactgatgatgataatgaaatgaataatctccaaattgctgtggataggatgcacaaaggagtagcttatgtgaaaagaaaaatatatgaatttattcaacagtccttcattaggaaacaaaagattttagatgaaattaaaccacttgatgatctaaacaacaagaaagacagttgtatgtccaatcatacaacagaaattgggaaagatcttgactatcttaaagatgtaaatggaactacaagtggtataggaactggcagcagtgttgaaaaatacattattgatgaaagtgattacatgtcattcataaacaaccccagtcttactgtgactgtaccaattgctgtaggagaatctgactttgaaaatttaaacacggaagactttagtagtgaatcggatctggaagaaagcaaagagaaactgaatgaaagcagtagctcatcagaaggtagcactgtggacatcggcgcacctgtagaagaacagcccgtagtggaacctgaagaaactcttgaaccagaagcttgtttcactgaaggctgtgtacaaagattcaagtgttgtcaaatcaatgtggaagaaggcagaggaaaacaatggtggaacctgagaaggacgtgtttccgaatagttgaacataactggtttgagaccttcattgttttcatgattctccttagtagtggtgctctggcatttgaagatatatatattgatcagcgaaagacgattaagacgatgttggaatatgctgacaaggttttcacttacattttcattctggaaatgcttctaaaatgggtggcatatggctatcaaacatatttcaccaatgcctggtgttggctggacttcttaattgttgatgtttcattggtcagtttaacagcaaatgccttgggttactcagaacttggagccatcaaatctctcaggacactaagagctctgagacctctaagagccttatctcgatttgaagggatgagggtggttgtgaatgcccttttaggagcaattccatccatcatgaatgtgcttctggtttgtcttatattctggctaattttcagcatcatgggcgtaaatttgtttgctggcaaattctaccactgtattaacaccacaactggtgacaggtttgacatcgaagacgtgaataatcatactgattgcctaaaactaatagaaagaaatgagactgctcgatggaaaaatgtgaaagtaaactttgataatgtaggatttgggtatctctctttgctttaagttgccacattcaaaggatggatggatataatgtatgcagcagttgattccagaaatgtggaactccagcctaagtatgaaaaaagtctgtacatgtatctttactttgttattttcatcatctttgggtccttcttcaccttgaacctgtttattggtgtcatcatagataatttcaaccagcagaaaaagaagtttggaggtcaagacatctttatgacagaagaacagaagaaatactataatgcaatgaaaaaattaggatcgaaaaaaccgcaaaagcctatacctcgaccaggaaacaaatttcaaggaatggtctttgacttcgtaaccagacaagtttttgacataagcatcatgattctcatctgtcttaacatggtcacaatgatggtggaaacagatgaccagagtgaatatgtgactaccattttgtcacgcatcaatctggtgttcattgtgctatttactggagagtgtgtactgaaactcatctctctacgccattattattttaccattggatggaatatttttgattttgtggttgtcattctctccattgtaggtatgtttcttgccgagctgatagaaaagtatttcgtgtcccctaccctgttccgagtgatccgtcttgctaggattggccgaatcctacgtctgatcaaaggagcaaaggggatccgcacgctgctctttgctttgatgatgtcccttcctgcgttgtttaacatcggcctcctactcttcctagtcatgttcatctacgccatctttgggatgtccaactttgcctatgttaagagggaagttgggatcgatgacatgttcaactttgagacctttggcaacagcatgatctgcctattccaaattacaacctctgctggctgggatggattgctagcacccattctcaacagtaagccacccgactgtgaccctaataaagttaaccctggaagctcagttaagggagactgtgggaacccatctgttggaattttcttttttgtcagttacatcatcatatccttcctggttgtggtgaacatgtacatcgcggtcatcctggagaacttcagtgttgctactgaagaaagtgcagagcctctgagtgaggatgactttgagatgttctatgaggtttgggagaagtttgatcccgatgcaactcagttcatggaatttgaaaaattatctcagtttgcagctgcgcttgaaccgcctctcaatctgccacaaccaaacaaactccagctcattgccatggatttgcccatggtgagtggtgaccggatccactgtcttgatatcttatttgcttttacaaagcgggttctaggagagagtggagagatggatgctctacgaatacagatggaagagcgattcatggcttccaatccttccaaggtctcctatcagccaatcactactactttaaaacgaaaacaagaggaagtatctgctgtcattattcagcgtgcttacagacgccaccttttaaagcgaactgtaaaacaagcttcctttacgtacaataaaaacaaaatcaaaggtggggctaatcttcttataaaagaagacatgataattgacagaataaatgaaaactctattacagaaaaaactgatctgaccatgtccactgcagcttgtccaccttcctatgaccgggtgacaaagccaattgtggaaaaacatgagcaagaaggcaaagatgaaaaagccaaagggaaataaatgaaaataaataaaaataattgggtgacaaattgtttacagcctgtgaaggtgatgtatttttatcaacaggactcctttaggaggtcaatgccaaactgactgtttttacacaaatctccttaaggtcagtgcctacaataagacagtgaccccttgtcagcaaactgtgactctgtgtaaaggggagatgaccttgacaggaggttactgttctcactaccagctgacactgctgaagataagatgcacaatggctagtcagactgtagggaccagtttcaaggggtgcaaacctgtgattttggggttgtttaacatgaaacactttagtgtagtaattgtatccactgtttgcatttcaactgccacatttgtcacatttttatggaatctgttagtggattcatctttttgttaatccatgtgtttattatatgtgactatttttgtaaacgaagtttctgttgagaaataggctaaggacctctataacaggtatgccacctggggggtatggcaaccacatggccctcccagctacacaaagtcgtggtttgcatgagggcatgctgcacttagagatcatgcatgagaaaaagtcacaagaaaaacaaattcttaaatttcaccatatttctgggaggggtaattgggtgataagtggaggtgctttgttgatcttgttttgcgaaatccagcccctagaccaagtagattatttgtgggtaggccagtaaatcttagcaggtgcaaacttcattcaaatgtttggagtcataaatgttatgtttctttttgttgtattaaaaaaaaaacctgaatagtgaatattgcccctcaccctccaccgccagaagactgaattgaccaaaattactctttataaatttctgctttttcctgcactttgtttagccatctttgggctctcagcaaggttgacactgtatatgttaatgaaatgctatttattatgtaaatagtcattttaccctgtggtgcacgtttgagcaaacaaataatgacctaagcacagtatttattgcatcaaatatgtaccacaagaaatgtagagtgcaagctttacacaggtaataaaatgtattctgtaccatttatagatagtttggatgctatcaatgcatgtttatattaccatgctgctgtatctggtttctctcactgctcagaatctcatttatgagaaaccatatgtcagtggtaaagtcaaggaaattgttcaacagatctcatttatttaagtcattaagcaatagtttgcagcactttaacagctttttggttatttttacattttaagtggataacatatggtatatagccagactgtacagacatgtttaaaaaaacacactgcttaacctattaaatatgtgtttagaattttataagcaaatataaatactgtaaaaagtcactttattttatttttcagcattatgtacataaatatgaagaggaaattatcttcaggttgatatcacaatcacttttcttactttctgtccatagtactttttcatgaaagaaatttgctaaataagacatgaaaacaagactgggtagttgtagatttctgctttttaaattacatttgctaattttagattatttcacaattttaaggagcaaaataggttcacgattcatatccaaattatgctttgcaattggaaaagggtttaaaattttatttatatttctggtagtacctgtactaactgaattgaaggtagtgcttatgttatttttgttctttttttctgacttcggtttatgttttcatttctttggagtaatgctgctctagattgttctaaatagaatgtgggcttcataatttttttttccacaaaaacagagtagtcaacttatatagtcaattacatcaggacattttgtgtttcttacagaagcaaaccataggctcctcttttccttaaaactacttagataaactgtattcgtgaactgcatgctggaaaatgctactattatgctaaataatgctaaccaacatttaaaatgtgcaaaactaataaagattacattttttatttt

SEQ ID NO: 24 - DNA, 229 bp, Homo sapiens
atacaccttcacaggaatatatacttttgaatcacttataaaaattattgcaaggggattctgtttagaagattttactttccttcgggatccatggaactggctcgatttcactgtcattacatttgcgtaaatgccttttttgaaactttaagagagaacatagtttggttttccatcagtgcttatgcttttaagaataggtttgctttacctgtagaatattttg

SEQ ID NO: 25 - DNA, 229 bp, Homo sapiens
tttttagtatttatctattccactgatggagtgataagaaattggtatgctatgaaaaaacactgttactttatcaaattttttggaagcttgttttcagatacaccttcacaggaatatatacttttgaatcacttataaaaattattgcaaggggattctgtttagaagattttactttccttcgggatccatggaactggctcgatttcactgtcattacatttgc

SEQ ID NO: 26 - protein, 2009 aa, Homo sapiens
MEQTVLVPPGPDSFNFFTRESLAAIERRIAEEKAKNPKPDKKDDDENGPKPNSDLEAGKNLPFIYGDIPPEMVSEPLEDLDPYCINKKTFIVLNKLKAIFRFSATSALYILTPFNPLRKIAIKILVHSLFSMLIMCTILTNCVFMTMSNPPDWTKNVEYTFTGIYTFESLIKIIARGFCLEDFTFLRDPWNWLDFTVITFAYVTEFVDLGNVSALRTFRVLRALKTISVIPGLKTIVGALIQSVKKLSDVMILTVFCLSVFALIGLQLFMGNLRNKCIQWPPTNASLEEHSIEKNITVNYNGTLINETVFEFDWKSYIQDSRYHYFLEGFLDALLCGNSSDAGQCPEGYMCVKAGRNPNYGYTSFDTFSWAFLSLFRLMTQDFWENLYQLTLRAAGKTYMIFFVLVIFLGSFYLINLILAVVAMAYEEQNQATLEEAEQKEAEFQQMIEQLKKQQEAAQQAATATASEHSREPSAAGRLSDSSSEASKLSSKSAKERRNRRKKRKQKEQSGGEEKDEDEFQKSESEDSIRRKGFRFSIEGNRLTYEKRYSSPHQSLLSIRGSLFSPRRNSRTSLFSFRGRAKDVGSENDFADDEHSTFEDNESRRDSLFVPRRHGERRNSNLSQTSRSSRMLAVFPANGKMHSTVDCNGVVSLVGGPSVPTSPVGQLLPEVIIDKPATDDNGTTTETEMRKRRSSSFHVSMDFLEDPSQRQRAMSIASILTNTVEELEESRQKCPPCWYKFSNIFLIWDCSPYWLKVKHVVNLVVMDPFVDLAITICIVLNTLFMAMEHYPMTDHFNNVLTVGNLVFTGIFTAEMFLKIIAMDPYYYFQEGWNIFDGFIVTLSLVELGLANVEGLSVLRSFRLLRVFKLAKSWPTLNMLIKIIGNSVGALGNLTLVLAIIVFIFAVVGMQLFGKSYKDCVCKIASDCQLPRWHMNDFFHSFLIVFRVLCGEWIETMWDCMEVAGQAMCLTVFMMVMVIGNLVVLNLFLALLLSSFSADNLAATDDDNEMNNLQIAVDRMHKGVAYVKRKIYEFIQQSFIRKQKILDEIKPLDDLNNKKDSCMSNHTTEIGKDLDYLKDVNGTTSGIGTGSSVEKYIIDESDYMSFINNPSLTVTVPIAVGESDFENLNTEDFSSESDLEESKEKLNESSSSSEGSTVDIGAPVEEQPVVEPEETLEPEACFTEGCVQRFKCCQINVEEGRGKQWWNLRRTCFRIVEHNWFETFIVFMILLSSGALAFEDIYIDQRKTIKTMLEYADKVFTYIFILEMLLKWVAYGYQTYFTNAWCWLDFLIVDVSLVSLTANALGYSELGAIKSLRTLRALRPLRALSRFEGMRVVVNALLGAIPSIMNVLLVCLIFWLIFSIMGVNLFAGKFYHCINTTTGDRFDIEDVNNHTDCLKLIERNETARWKNVKVNFDNVGFGYLSLLQVATFKGWMDIMYAAVDSRNVELQPKYEKSLYMYLYFVIFIIFGSFFTLNLFIGVIIDNFNQQKKKFGGQDIFMTEEQKKYYNAMKKLGSKKPQKPIPRPGNKFQGMVFDFVTRQVFDISIMILICLNMVTMMVETDDQSEYVTTILSRINLVFIVLFTGECVLKLISLRHYYFTIGWNIFDFVVVILSIVGMFLAELIEKYFVSPTLFRVIRLARIGRILRLIKGAKGIRTLLFALMMSLPALFNIGLLLFLVMFIYAIFGMSNFAYVKREVGIDDMFNFETFGNSMICLFQITTSAGWDGLLAPILNSKPPDCDPNKVNPGSSVKGDCGNPSVGIFFFVSYIIISFLVVVNMYIAVILENFSVATEESAEPLSEDDFEMFYEVWEKFDPDATQFMEFEKLSQFAAALEPPLNLPQPNKLQLIAMDLPMVSGDRIHCLDILFAFTKRVLGESGEMDALRIQMEERFMASNPSKVSYQPITTTLKRKQEEVSAVIIQRAYRRHLLKRTVKQASFTYNKNKIKGGANLLIKEDMIIDRINENSITEKTDLTMSTAACPPSYDRVTKPIVEKHEQEGKDEKAKGK

SEQ ID NO: 27 - protein, 2009 aa, Homo sapiens
MEQTVLVPPGPDSFNFFTRESLAAIERRIAEEKAKNPKPDKKDDDENGPKPNSDLEAGKNLPFIYGDIPPEMVSEPLEDLDPYYINKKTFIVLNKLKAIFWFSATSALYILTPFNPLRKIAIKILVHSLFSMLIMCTILTNCVFMTMSNPPDWTKNVEYTFTGIYTFESLIKIIARGFCLEDFTFLRDPWNWLDFTVITFAYVTEFVDLGNVSALRTFRVLRALKTISVIPGLKTIVGALIQSVKKLSDVMILTVFCLSVFALIGLQLFMGNLRNKCIQWPPTNASLEEHSIEKNITVNYNGTLINETVFEFDWKSYIQDSRYHYFLEGFLDALLCGNSSDAGQCPEGYMCVKAGRNPNYGYTSFDTFSWAFLSLFRLMTQDFWENLYQLTLRAAGKTYMIFFVLVIFLGSFYLINLILAVVAMAYEEQNQATLEEAEQKEAEFQQMIEQLKKQQEAAQQAATATASEHSREPSAAGRLSDSSSEASKLSSKSAKERRNRRKKRKQKEQSGGEEKDEDEFQKSESEDSIRRKGFRFSIEGNRLTYEKRYSSPHQSLLSIRGSLFSPRRNSRTSLFSFRGRAKDVGSENDFADDEHSTFEDNESRRDSLFVPRRHGERRNSNLSQTSRSSRMLAVFPANGKMHSTVDCNGVVSLVGGPSVPTSPVGQLLPEVIIDKPATDDNGTTTETEMRKRRSSSFHVSMDFLEDPSQRQRAMSIASILTNTVEELEESRQKCPPCWYKFSNIFLIWDCSPYWLKVKHVVNLVVMDPFVDLAITICIVLNTLFMAMEHYPMTDHFNNVLTVGNLVFTGIFTAEMFLKIIAMDPYYYFQEGWNIFDGFIVTLSLVELGLANVEGLSVLRSFRLLRVFKLAKSWPTLNMLIKIIGNSVGALGNLTLVLAIIVFIFAVVGMQLFGKSYKDCVCKIASDCQLPRWHMNDFFHSFLIVFRVLCGEWIETMWDCMEVAGQAMCLTVFMMVMVIGNLVVLNLFLALLLSSFSADNLAATDDDNEMNNLQIAVDRMHKGVAYVKRKIYEFIQQSFIRKQKILDEIKPLDDLNNKKDSCMSNHTTEIGKDLDYLKDVNGTTSGIGTGSSVEKYIIDESDYMSFINNPSLTVTVPIAVGESDFENLNTEDFSSESDLEESKEKLNESSSSSEGSTVDIGAPVEEQPVVEPEETLEPEACFTEGCVQRFKCCQINVEEGRGKQWWNLRRTCFRIVEHNWFETFIVFMILLSSGALAFEDIYIDQRKTIKTMLEYADKVFTYIFILEMLLKWVAYGYQTYFTNAWCWLDFLIVDVSLVSLTANALGYSELGAIKSLRTLRALRPLRALSRFEGMRVVVNALLGAIPSIMNVLLVCLIFWLIFSIMGVNLFAGKFYHCINTTTGDRFDIEDVNNHTDCLKLIERNETARWKNVKVNFDNVGFGYLSLLQVATFKGWMDIMYAAVDSRNVELQPKYEKSLYMYLYFVIFIIFGSFFTLNLFIGVIIDNFNQQKKKFGGQDIFMTEEQKKYYNAMKKLGSKKPQKPIPRPGNKFQGMVFDFVTRQVFDISIMILICLNMVTMMVETDDQSEYVTTILSRINLVFIVLFTGECVLKLISLRHYYFTIGWNIFDFVVVILSIVGMFLAELIEKYFVSPTLFRVIRLARIGRILRLIKGAKGIRTLLFALMMSLPALFNIGLLLFLVMFIYAIFGMSNFAYVKREVGIDDMFNFETFGNSMICLFQITTSAGWDGLLAPILNSKPPDCDPNKVNPGSSVKGDCGNPSVGIFFFVSYIIISFLVVVNMYIAVILENFSVATEESAEPLSEDDFEMFYEVWEKFDPDATQFMEFEKLSQFAAALEPPLNLPQPNKLQLIAMDLPMVSGDRIHCLDILFAFTKRVLGESGEMDALRIQMEERFMASNPSKVSYQPITTTLKRKQEEVSAVIIQRAYRRHLLKRTVKQASFTYNKNKIKGGANLLIKEDMIIDRINENSITEKTDLTMSTAACPPSYDRVTKPIVEKHEQEGKDEKAKGK

SEQ ID NO: 28 - protein, 2009 aa, Homo sapiens
MEQTVLVPPGPDSFNFFTRESLAAIERRIAEEKAKNPKPDKKDDDENGPKPNSDLEAGKNLPFIYGDIPPEMVSEPLEDLDPYYINKKTFIVLNKLKAIFRFSATSALYILTPFNPLRKIAIKILVHSLFSMLIMCTILTNCVFMTMSNPPDWTKNVEYTFTGIYTFESLKKIIARGFCLEDFTFLRDPWNWLDFTVITFAYVTEFVDLGNVSALRTFRVLRALKTISVIPGLKTIVGALIQSVKKLSDVMILTVFCLSVFALIGLQLFMGNLRNKCIQWPPTNASLEEHSIEKNITVNYNGTLINETVFEFDWKSYIQDSRYHYFLEGFLDALLCGNSSDAGQCPEGYMCVKAGRNPNYGYTSFDTFSWAFLSLFRLMTQDFWENLYQLTLRAAGKTYMIFFVLVIFLGSFYLINLILAVVAMAYEEQNQATLEEAEQKEAEFQQMIEQLKKQQEAAQQAATATASEHSREPSAAGRLSDSSSEASKLSSKSAKERRNRRKKRKQKEQSGGEEKDEDEFQKSESEDSIRRKGFRFSIEGNRLTYEKRYSSPHQSLLSIRGSLFSPRRNSRTSLFSFRGRAKDVGSENDFADDEHSTFEDNESRRDSLFVPRRHGERRNSNLSQTSRSSRMLAVFPANGKMHSTVDCNGVVSLVGGPSVPTSPVGQLLPEVIIDKPATDDNGTTTETEMRKRRSSSFHVSMDFLEDPSQRQRAMSIASILTNTVEELEESRQKCPPCWYKFSNIFLIWDCSPYWLKVKHVVNLVVMDPFVDLAITICIVLNTLFMAMEHYPMTDHFNNVLTVGNLVFTGIFTAEMFLKIIAMDPYYYFQEGWNIFDGFIVTLSLVELGLANVEGLSVLRSFRLLRVFKLAKSWPTLNMLIKIIGNSVGALGNLTLVLAIIVFIFAVVGMQLFGKSYKDCVCKIASDCQLPRWHMNDFFHSFLIVFRVLCGEWIETMWDCMEVAGQAMCLTVFMMVMVIGNLVVLNLFLALLLSSFSADNLAATDDDNEMNNLQIAVDRMHKGVAYVKRKIYEFIQQSFIRKQKILDEIKPLDDLNNKKDSCMSNHTTEIGKDLDYLKDVNGTTSGIGTGSSVEKYIIDESDYMSFINNPSLTVTVPIAVGESDFENLNTEDFSSESDLEESKEKLNESSSSSEGSTVDIGAPVEEQPVVEPEETLEPEACFTEGCVQRFKCCQINVEEGRGKQWWNLRRTCFRIVEHNWFETFIVFMILLSSGALAFEDIYIDQRKTIKTMLEYADKVFTYIFILEMLLKWVAYGYQTYFTNAWCWLDFLIVDVSLVSLTANALGYSELGAIKSLRTLRALRPLRALSRFEGMRVVVNALLGAIPSIMNVLLVCLIFWLIFSIMGVNLFAGKFYHCINTTTGDRFDIEDVNNHTDCLKLIERNETARWKNVKVNFDNVGFGYLSLLQVATFKGWMDIMYAAVDSRNVELQPKYEKSLYMYLYFVIFIIFGSFFTLNLFIGVIIDNFNQQKKKFGGQDIFMTEEQKKYYNAMKKLGSKKPQKPIPRPGNKFQGMVFDFVTRQVFDISIMILICLNMVTMMVETDDQSEYVTTILSRINLVFIVLFTGECVLKLISLRHYYFTIGWNIFDFVVVILSIVGMFLAELIEKYFVSPTLFRVIRLARIGRILRLIKGAKGIRTLLFALMMSLPALFNIGLLLFLVMFIYAIFGMSNFAYVKREVGIDDMFNFETFGNSMICLFQITTSAGWDGLLAPILNSKPPDCDPNKVNPGSSVKGDCGNPSVGIFFFVSYIIISFLVVVNMYIAVILENFSVATEESAEPLSEDDFEMFYEVWEKFDPDATQFMEFEKLSQFAAALEPPLNLPQPNKLQLIAMDLPMVSGDRIHCLDILFAFTKRVLGESGEMDALRIQMEERFMASNPSKVSYQPITTTLKRKQEEVSAVIIQRAYRRHLLKRTVKQASFTYNKNKIKGGANLLIKEDMIIDRINENSITEKTDLTMSTAACPPSYDRVTKPIVEKHEQEGKDEKAKGK

SEQ ID NO: 29 - protein, 2009 aa, Homo sapiens
MEQTVLVPPGPDSFNFFTRESLAAIERRIAEEKAKNPKPDKKDDDENGPKPNSDLEAGKNLPFIYGDIPPEMVSEPLEDLDPYYINKKTFIVLNKLKAIFRFSATSALYILTPFNPLRKIAIKILVHSLFSMLIMCTILTNCVFMTMSNPPDWTKNVEYTFTGIYTFESLIKIIARGFCLEDFTFLRDPWNWLDFTVIRFAYVTEFVDLGNVSALRTFRVLRALKTISVIPGLKTIVGALIQSVKKLSDVMILTVFCLSVFALIGLQLFMGNLRNKCIQWPPTNASLEEHSIEKNITVNYNGTLINETVFEFDWKSYIQDSRYHYFLEGFLDALLCGNSSDAGQCPEGYMCVKAGRNPNYGYTSFDTFSWAFLSLFRLMTQDFWENLYQLTLRAAGKTYMIFFVLVIFLGSFYLINLILAVVAMAYEEQNQATLEEAEQKEAEFQQMIEQLKKQQEAAQQAATATASEHSREPSAAGRLSDSSSEASKLSSKSAKERRNRRKKRKQKEQSGGEEKDEDEFQKSESEDSIRRKGFRFSIEGNRLTYEKRYSSPHQSLLSIRGSLFSPRRNSRTSLFSFRGRAKDVGSENDFADDEHSTFEDNESRRDSLFVPRRHGERRNSNLSQTSRSSRMLAVFPANGKMHSTVDCNGVVSLVGGPSVPTSPVGQLLPEVIIDKPATDDNGTTTETEMRKRRSSSFHVSMDFLEDPSQRQRAMSIASILTNTVEELEESRQKCPPCWYKFSNIFLIWDCSPYWLKVKHVVNLVVMDPFVDLAITICIVLNTLFMAMEHYPMTDHFNNVLTVGNLVFTGIFTAEMFLKIIAMDPYYYFQEGWNIFDGFIVTLSLVELGLANVEGLSVLRSFRLLRVFKLAKSWPTLNMLIKIIGNSVGALGNLTLVLAIIVFIFAVVGMQLFGKSYKDCVCKIASDCQLPRWHMNDFFHSFLIVFRVLCGEWIETMWDCMEVAGQAMCLTVFMMVMVIGNLVVLNLFLALLLSSFSADNLAATDDDNEMNNLQIAVDRMHKGVAYVKRKIYEFIQQSFIRKQKILDEIKPLDDLNNKKDSCMSNHTTEIGKDLDYLKDVNGTTSGIGTGSSVEKYIIDESDYMSFINNPSLTVTVPIAVGESDFENLNTEDFSSESDLEESKEKLNESSSSSEGSTVDIGAPVEEQPVVEPEETLEPEACFTEGCVQRFKCCQINVEEGRGKQWWNLRRTCFRIVEHNWFETFIVFMILLSSGALAFEDIYIDQRKTIKTMLEYADKVFTYIFILEMLLKWVAYGYQTYFTNAWCWLDFLIVDVSLVSLTANALGYSELGAIKSLRTLRALRPLRALSRFEGMRVVVNALLGAIPSIMNVLLVCLIFWLIFSIMGVNLFAGKFYHCINTTTGDRFDIEDVNNHTDCLKLIERNETARWKNVKVNFDNVGFGYLSLLQVATFKGWMDIMYAAVDSRNVELQPKYEKSLYMYLYFVIFIIFGSFFTLNLFIGVIIDNFNQQKKKFGGQDIFMTEEQKKYYNAMKKLGSKKPQKPIPRPGNKFQGMVFDFVTRQVFDISIMILICLNMVTMMVETDDQSEYVTTILSRINLVFIVLFTGECVLKLISLRHYYFTIGWNIFDFVVVILSIVGMFLAELIEKYFVSPTLFRVIRLARIGRILRLIKGAKGIRTLLFALMMSLPALFNIGLLLFLVMFIYAIFGMSNFAYVKREVGIDDMFNFETFGNSMICLFQITTSAGWDGLLAPILNSKPPDCDPNKVNPGSSVKGDCGNPSVGIFFFVSYIIISFLVVVNMYIAVILENFSVATEESAEPLSEDDFEMFYEVWEKFDPDATQFMEFEKLSQFAAALEPPLNLPQPNKLQLIAMDLPMVSGDRIHCLDILFAFTKRVLGESGEMDALRIQMEERFMASNPSKVSYQPITTTLKRKQEEVSAVIIQRAYRRHLLKRTVKQASFTYNKNKIKGGANLLIKEDMIIDRINENSITEKTDLTMSTAACPPSYDRVTKPIVEKHEQEGKDEKAKGK

SEQ ID NO: 30 - protein, 2009 aa, Homo sapiens
MEQTVLVPPGPDSFNFFTRESLAAIERRIAEEKAKNPKPDKKDDDENGPKPNSDLEAGKNLPFIYGDIPPEMVSEPLEDLDPYYINKKTFIVLNKLKAIFRFSATSALYILTPFNPLRKIAIKILVHSLFSMLIMCTILTNCVFMTMSNPPDWTKNVEYTFTGIYTFESLIKIIARGFCLEDFTFLRDPWNWLDFTVITFAYVTEFVDLGNVSALRTFRVLRALKMISVIPGLKTIVGALIQSVKKLSDVMILTVFCLSVFALIGLQLFMGNLRNKCIQWPPTNASLEEHSIEKNITVNYNGTLINETVFEFDWKSYIQDSRYHYFLEGFLDALLCGNSSDAGQCPEGYMCVKAGRNPNYGYTSFDTFSWAFLSLFRLMTQDFWENLYQLTLRAAGKTYMIFFVLVIFLGSFYLINLILAVVAMAYEEQNQATLEEAEQKEAEFQQMIEQLKKQQEAAQQAATATASEHSREPSAAGRLSDSSSEASKLSSKSAKERRNRRKKRKQKEQSGGEEKDEDEFQKSESEDSIRRKGFRFSIEGNRLTYEKRYSSPHQSLLSIRGSLFSPRRNSRTSLFSFRGRAKDVGSENDFADDEHSTFEDNESRRDSLFVPRRHGERRNSNLSQTSRSSRMLAVFPANGKMHSTVDCNGVVSLVGGPSVPTSPVGQLLPEVIIDKPATDDNGTTTETEMRKRRSSSFHVSMDFLEDPSQRQRAMSIASILTNTVEELEESRQKCPPCWYKFSNIFLIWDCSPYWLKVKHVVNLVVMDPFVDLAITICIVLNTLFMAMEHYPMTDHFNNVLTVGNLVFTGIFTAEMFLKIIAMDPYYYFQEGWNIFDGFIVTLSLVELGLANVEGLSVLRSFRLLRVFKLAKSWPTLNMLIKIIGNSVGALGNLTLVLAIIVFIFAVVGMQLFGKSYKDCVCKIASDCQLPRWHMNDFFHSFLIVFRVLCGEWIETMWDCMEVAGQAMCLTVFMMVMVIGNLVVLNLFLALLLSSFSADNLAATDDDNEMNNLQIAVDRMHKGVAYVKRKIYEFIQQSFIRKQKILDEIKPLDDLNNKKDSCMSNHTTEIGKDLDYLKDVNGTTSGIGTGSSVEKYIIDESDYMSFINNPSLTVTVPIAVGESDFENLNTEDFSSESDLEESKEKLNESSSSSEGSTVDIGAPVEEQPVVEPEETLEPEACFTEGCVQRFKCCQINVEEGRGKQWWNLRRTCFRIVEHNWFETFIVFMILLSSGALAFEDIYIDQRKTIKTMLEYADKVFTYIFILEMLLKWVAYGYQTYFTNAWCWLDFLIVDVSLVSLTANALGYSELGAIKSLRTLRALRPLRALSRFEGMRVVVNALLGAIPSIMNVLLVCLIFWLIFSIMGVNLFAGKFYHCINTTTGDRFDIEDVNNHTDCLKLIERNETARWKNVKVNFDNVGFGYLSLLQVATFKGWMDIMYAAVDSRNVELQPKYEKSLYMYLYFVIFIIFGSFFTLNLFIGVIIDNFNQQKKKFGGQDIFMTEEQKKYYNAMKKLGSKKPQKPIPRPGNKFQGMVFDFVTRQVFDISIMILICLNMVTMMVETDDQSEYVTTILSRINLVFIVLFTGECVLKLISLRHYYFTIGWNIFDFVVVILSIVGMFLAELIEKYFVSPTLFRVIRLARIGRILRLIKGAKGIRTLLFALMMSLPALFNIGLLLFLVMFIYAIFGMSNFAYVKREVGIDDMFNFETFGNSMICLFQITTSAGWDGLLAPILNSKPPDCDPNKVNPGSSVKGDCGNPSVGIFFFVSYIIISFLVVVNMYIAVILENFSVATEESAEPLSEDDFEMFYEVWEKFDPDATQFMEFEKLSQFAAALEPPLNLPQPNKLQLIAMDLPMVSGDRIHCLDILFAFTKRVLGESGEMDALRIQMEERFMASNPSKVSYQPITTTLKRKQEEVSAVIIQRAYRRHLLKRTVKQASFTYNKNKIKGGANLLIKEDMIIDRINENSITEKTDLTMSTAACPPSYDRVTKPIVEKHEQEGKDEKAKGK

SEQ ID NO: 31 - protein, 2009 aa, Homo sapiens
MEQTVLVPPGPDSFNFFTRESLAAIERRIAEEKAKNPKPDKKDDDENGPKPNSDLEAGKNLPFIYGDIPPEMVSEPLEDLDPYYINKKTFIVLNKLKAIFRFSATSALYILTPFNPLRKIAIKILVHSLFSMLIMCTILTNCVFMTMSNPPDWTKNVEYTFTGIYTFESLIKIIARGFCLEDFTFLRDPWNWLDFTVITFAYVTEFVDLGNVSALRTFRVLRALKTISVIPGLKTIVGTLIQSVKKLSDVMILTVFCLSVFALIGLQLFMGNLRNKCIQWPPTNASLEEHSIEKNITVNYNGTLINETVFEFDWKSYIQDSRYHYFLEGFLDALLCGNSSDAGQCPEGYMCVKAGRNPNYGYTSFDTFSWAFLSLFRLMTQDFWENLYQLTLRAAGKTYMIFFVLVIFLGSFYLINLILAVVAMAYEEQNQATLEEAEQKEAEFQQMIEQLKKQQEAAQQAATATASEHSREPSAAGRLSDSSSEASKLSSKSAKERRNRRKKRKQKEQSGGEEKDEDEFQKSESEDSIRRKGFRFSIEGNRLTYEKRYSSPHQSLLSIRGSLFSPRRNSRTSLFSFRGRAKDVGSENDFADDEHSTFEDNESRRDSLFVPRRHGERRNSNLSQTSRSSRMLAVFPANGKMHSTVDCNGVVSLVGGPSVPTSPVGQLLPEVIIDKPATDDNGTTTETEMRKRRSSSFHVSMDFLEDPSQRQRAMSIASILTNTVEELEESRQKCPPCWYKFSNIFLIWDCSPYWLKVKHVVNLVVMDPFVDLAITICIVLNTLFMAMEHYPMTDHFNNVLTVGNLVFTGIFTAEMFLKIIAMDPYYYFQEGWNIFDGFIVTLSLVELGLANVEGLSVLRSFRLLRVFKLAKSWPTLNMLIKIIGNSVGALGNLTLVLAIIVFIFAVVGMQLFGKSYKDCVCKIASDCQLPRWHMNDFFHSFLIVFRVLCGEWIETMWDCMEVAGQAMCLTVFMMVMVIGNLVVLNLFLALLLSSFSADNLAATDDDNEMNNLQIAVDRMHKGVAYVKRKIYEFIQQSFIRKQKILDEIKPLDDLNNKKDSCMSNHTTEIGKDLDYLKDVNGTTSGIGTGSSVEKYIIDESDYMSFINNPSLTVTVPIAVGESDFENLNTEDFSSESDLEESKEKLNESSSSSEGSTVDIGAPVEEQPVVEPEETLEPEACFTEGCVQRFKCCQINVEEGRGKQWWNLRRTCFRIVEHNWFETFIVFMILLSSGALAFEDIYIDQRKTIKTMLEYADKVFTYIFILEMLLKWVAYGYQTYFTNAWCWLDFLIVDVSLVSLTANALGYSELGAIKSLRTLRALRPLRALSRFEGMRVVVNALLGAIPSIMNVLLVCLIFWLIFSIMGVNLFAGKFYHCINTTTGDRFDIEDVNNHTDCLKLIERNETARWKNVKVNFDNVGFGYLSLLQVATFKGWMDIMYAAVDSRNVELQPKYEKSLYMYLYFVIFIIFGSFFTLNLFIGVIIDNFNQQKKKFGGQDIFMTEEQKKYYNAMKKLGSKKPQKPIPRPGNKFQGMVFDFVTRQVFDISIMILICLNMVTMMVETDDQSEYVTTILSRINLVFIVLFTGECVLKLISLRHYYFTIGWNIFDFVVVILSIVGMFLAELIEKYFVSPTLFRVIRLARIGRILRLIKGAKGIRTLLFALMMSLPALFNIGLLLFLVMFIYAIFGMSNFAYVKREVGIDDMFNFETFGNSMICLFQITTSAGWDGLLAPILNSKPPDCDPNKVNPGSSVKGDCGNPSVGIFFFVSYIIISFLVVVNMYIAVILENFSVATEESAEPLSEDDFEMFYEVWEKFDPDATQFMEFEKLSQFAAALEPPLNLPQPNKLQLIAMDLPMVSGDRIHCLDILFAFTKRVLGESGEMDALRIQMEERFMASNPSKVSYQPITTTLKRKQEEVSAVIIQRAYRRHLLKRTVKQASFTYNKNKIKGGANLLIKEDMIIDRINENSITEKTDLTMSTAACPPSYDRVTKPIVEKHEQEGKDEKAKGK

SEQ ID NO: 32 - protein, 2009 aa, Homo sapiens
MEQTVLVPPGPDSFNFFTRESLAAIERRIAEEKAKNPKPDKKDDDENGPKPNSDLEAGKNLPFIYGDIPPEMVSEPLEDLDPYYINKKTFIVLNKLKAIFRFSATSALYILTPFNPLRKIAIKILVHSLFSMLIMCTILTNCVFMTMSNPPDWTKNVEYTFTGIYTFESLIKIIARGFCLEDFTFLRDPWNWLDFTVITFAYVTEFVDLGNVSALRTFRVLRALKTISVIPGLKTIVGALIQSVKKLSDVMILTVFCLSVFALIGLQLFMGNLRNKCIQWPPTNASLEEHSIEKNITVNYNGTLINETVFEFDWKSYIQDSRYHYFLEGFLDALLCGNSSDAGQCPEGYMCVKAGRNPNYGYTSFDTFSWAFLSLFRLMTQDFWENLYQLTLRAAGKTYMIFFVLVIFLGSFYLINLILAVVAMAYEEQNQATLEEAEQKEAEFQQMIEQLKKQQEAAQQAATATASEHSREPSAAGRLSDSSSEASKLSSKSAKERRNRRKKRKQKEQSGGEEKDEDEFQKSESEDSIRRKGFRFSIEGNRLTYEKRYSSPHQSLLSIRGSLFSPRRNSRTSLFSFRGRAKDVGSENDFADDEHSTFEDNESRRDSLFVPRRHGERRNSNLSQTSRSSRMLAVFPANGKMHSTVDCNGVVSLVGGPSVPTSPVGQLLPEVIIDKPATDDNGTTTETEMRKRRSSSFHVSMDFLEDPSQRQRAMSIASILTNTVEELEESRQKCPPCWYKFSNIFLIWDCSPYWLKVKHVVNLVVMDPFVDLAITICIVLNTLFMAMEHYPMTDHFNNVLTVGNLVFTGIFTAEMFLKIIAMDPYYYFQEGWNIFDGFIVTLSLVELGLANVEGLSVLRSFRLLRVFKLAKSWPTLNMLIKIIGNSVGALGNLTLVLAIIVFIFAVVGMQLFGKSYKDCVCKIASDCQLPRWHMNDFFHSFLIVFHVLCGEWIETMWDCMEVAGQAMCLTVFMMVMVIGNLVVLNLFLALLLSSFSADNLAATDDDNEMNNLQIAVDRMHKGVAYVKRKIYEFIQQSFIRKQKILDEIKPLDDLNNKKDSCMSNHTTEIGKDLDYLKDVNGTTSGIGTGSSVEKYIIDESDYMSFINNPSLTVTVPIAVGESDFENLNTEDFSSESDLEESKEKLNESSSSSEGSTVDIGAPVEEQPVVEPEETLEPEACFTEGCVQRFKCCQINVEEGRGKQWWNLRRTCFRIVEHNWFETFIVFMILLSSGALAFEDIYIDQRKTIKTMLEYADKVFTYIFILEMLLKWVAYGYQTYFTNAWCWLDFLIVDVSLVSLTANALGYSELGAIKSLRTLRALRPLRALSRFEGMRVVVNALLGAIPSIMNVLLVCLIFWLIFSIMGVNLFAGKFYHCINTTTGDRFDIEDVNNHTDCLKLIERNETARWKNVKVNFDNVGFGYLSLLQVATFKGWMDIMYAAVDSRNVELQPKYEKSLYMYLYFVIFIIFGSFFTLNLFIGVIIDNFNQQKKKFGGQDIFMTEEQKKYYNAMKKLGSKKPQKPIPRPGNKFQGMVFDFVTRQVFDISIMILICLNMVTMMVETDDQSEYVTTILSRINLVFIVLFTGECVLKLISLRHYYFTIGWNIFDFVVVILSIVGMFLAELIEKYFVSPTLFRVIRLARIGRILRLIKGAKGIRTLLFALMMSLPALFNIGLLLFLVMFIYAIFGMSNFAYVKREVGIDDMFNFETFGNSMICLFQITTSAGWDGLLAPILNSKPPDCDPNKVNPGSSVKGDCGNPSVGIFFFVSYIIISFLVVVNMYIAVILENFSVATEESAEPLSEDDFEMFYEVWEKFDPDATQFMEFEKLSQFAAALEPPLNLPQPNKLQLIAMDLPMVSGDRIHCLDILFAFTKRVLGESGEMDALRIQMEERFMASNPSKVSYQPITTTLKRKQEEVSAVIIQRAYRRHLLKRTVKQASFTYNKNKIKGGANLLIKEDMIIDRINENSITEKTDLTMSTAACPPSYDRVTKPIVEKHEQEGKDEKAKGK

SEQ ID NO: 33 - protein, 2009 aa, Homo sapiens
MEQTVLVPPGPDSFNFFTRESLAAIERRIAEEKAKNPKPDKKDDDENGPKPNSDLEAGKNLPFIYGDIPPEMVSEPLEDLDPYYINKKTFIVLNKLKAIFRFSATSALYILTPFNPLRKIAIKILVHSLFSMLIMCTILTNCVFMTMSNPPDWTKNVEYTFTGIYTFESLIKIIARGFCLEDFTFLRDPWNWLDFTVITFAYVTEFVDLGNVSALRTFRVLRALKTISVIPGLKTIVGALIQSVKKLSDVMILTVFCLSVFALIGLQLFMGNLRNKCIQWPPTNASLEEHSIEKNITVNYNGTLINETVFEFDWKSYIQDSRYHYFLEGFLDALLCGNSSDAGQCPEGYMCVKAGRNPNYGYTSFDTFSWAFLSLFRLMTQDFWENLYQLTLRAAGKTYMIFFVLVIFLGSFYLINLILAVVAMAYEEQNQATLEEAEQKEAEFQQMIEQLKKQQEAAQQAATATASEHSREPSAAGRLSDSSSEASKLSSKSAKERRNRRKKRKQKEQSGGEEKDEDEFQKSESEDSIRRKGFRFSIEGNRLTYEKRYSSPHQSLLSIRGSLFSPRRNSRTSLFSFRGRAKDVGSENDFADDEHSTFEDNESRRDSLFVPRRHGERRNSNLSQTSRSSRMLAVFPANGKMHSTVDCNGVVSLVGGPSVPTSPVGQLLPEVIIDKPATDDNGTTTETEMRKRRSSSFHVSMDFLEDPSQRQRAMSIASILTNTVEELEESRQKCPPCWYKFSNIFLIWDCSPYWLKVKHVVNLVVMDPFVDLAITICIVLNTLFMAMEHYPMTDHFNNVLTVGNLVFTGIFTAEMFLKIIAMDPYYYFQEGWNIFDGFIVTLSLVELGLANVEGLSVLRSFRLLRVFKLAKSWPTLNMLIKIIGNSVGALGNLTLVLAIIVFIFAVVGMQLFGKSYKDCVCKIASDCQLPRWHMNDFFHSFLIVFRVLCGEWIETMWDCMEVAGQAMCLTVFMMVMVIGNLVVLNLFLALLLSSFSADNLAATDDDNEMNNLQIAVDRMHKGVAYVKRKIYEFIQQSFIRKQKILDEIKPLDDLNNKKDSCMSNHTTEIGKDLDYLKDVNGTTSGIGTGSSVEKYIIDESDYMSFINNPSLTVTVPIAVGESDFENLNTEDFSSESDLEESKEKLNESSSSSEGSTVDIGAPVEEQPVVEPEETLEPEACFTEGCVQRFKCCQINVEEGRGKQWWNLRRTCFRIVEHNWFETFIVFMILLSSGALAFDDIYIDQRKTIKTMLEYADKVFTYIFILEMLLKWVAYGYQTYFTNAWCWLDFLIVDVSLVSLTANALGYSELGAIKSLRTLRALRPLRALSRFEGMRVVVNALLGAIPSIMNVLLVCLIFWLIFSIMGVNLFAGKFYHCINTTTGDRFDIEDVNNHTDCLKLIERNETARWKNVKVNFDNVGFGYLSLLQVATFKGWMDIMYAAVDSRNVELQPKYEKSLYMYLYFVIFIIFGSFFTLNLFIGVIIDNFNQQKKKFGGQDIFMTEEQKKYYNAMKKLGSKKPQKPIPRPGNKFQGMVFDFVTRQVFDISIMILICLNMVTMMVETDDQSEYVTTILSRINLVFIVLFTGECVLKLISLRHYYFTIGWNIFDFVVVILSIVGMFLAELIEKYFVSPTLFRVIRLARIGRILRLIKGAKGIRTLLFALMMSLPALFNIGLLLFLVMFIYAIFGMSNFAYVKREVGIDDMFNFETFGNSMICLFQITTSAGWDGLLAPILNSKPPDCDPNKVNPGSSVKGDCGNPSVGIFFFVSYIIISFLVVVNMYIAVILENFSVATEESAEPLSEDDFEMFYEVWEKFDPDATQFMEFEKLSQFAAALEPPLNLPQPNKLQLIAMDLPMVSGDRIHCLDILFAFTKRVLGESGEMDALRIQMEERFMASNPSKVSYQPITTTLKRKQEEVSAVIIQRAYRRHLLKRTVKQASFTYNKNKIKGGANLLIKEDMIIDRINENSITEKTDLTMSTAACPPSYDRVTKPIVEKHEQEGKDEKAKGK

SEQ ID NO: 34 - protein, 2009 aa, Homo sapiens
MEQTVLVPPGPDSFNFFTRESLAAIERRIAEEKAKNPKPDKKDDDENGPKPNSDLEAGKNLPFIYGDIPPEMVSEPLEDLDPYYINKKTFIVLNKLKAIFRFSATSALYILTPFNPLRKIAIKILVHSLFSMLIMCTILTNCVFMTMSNPPDWTKNVEYTFTGIYTFESLIKIIARGFCLEDFTFLRDPWNWLDFTVITFAYVTEFVDLGNVSALRTFRVLRALKTISVIPGLKTIVGALIQSVKKLSDVMILTVFCLSVFALIGLQLFMGNLRNKCIQWPPTNASLEEHSIEKNITVNYNGTLINETVFEFDWKSYIQDSRYHYFLEGFLDALLCGNSSDAGQCPEGYMCVKAGRNPNYGYTSFDTFSWAFLSLFRLMTQDFWENLYQLTLRAAGKTYMIFFVLVIFLGSFYLINLILAVVAMAYEEQNQATLEEAEQKEAEFQQMIEQLKKQQEAAQQAATATASEHSREPSAAGRLSDSSSEASKLSSKSAKERRNRRKKRKQKEQSGGEEKDEDEFQKSESEDSIRRKGFRFSIEGNRLTYEKRYSSPHQSLLSIRGSLFSPRRNSRTSLFSFRGRAKDVGSENDFADDEHSTFEDNESRRDSLFVPRRHGERRNSNLSQTSRSSRMLAVFPANGKMHSTVDCNGVVSLVGGPSVPTSPVGQLLPEVIIDKPATDDNGTTTETEMRKRRSSSFHVSMDFLEDPSQRQRAMSIASILTNTVEELEESRQKCPPCWYKFSNIFLIWDCSPYWLKVKHVVNLVVMDPFVDLAITICIVLNTLFMAMEHYPMTDHFNNVLTVGNLVFTGIFTAEMFLKIIAMDPYYYFQEGWNIFDGFIVTLSLVELGLANVEGLSVLRSFRLLRVFKLAKSWPTLNMLIKIIGNSVGALGNLTLVLAIIVFIFAVVGMQLFGKSYKDCVCKIASDCQLPRWHMNDFFHSFLIVFRVLCGEWIETMWDCMEVAGQAMCLTVFMMVMVIGNLVVLNLFLALLLSSFSADNLAATDDDNEMNNLQIAVDRMHKGVAYVKRKIYEFIQQSFIRKQKILDEIKPLDDLNNKKDSCMSNHTTEIGKDLDYLKDVNGTTSGIGTGSSVEKYIIDESDYMSFINNPSLTVTVPIAVGESDFENLNTEDFSSESDLEESKEKLNESSSSSEGSTVDIGAPVEEQPVVEPEETLEPEACFTEGCVQRFKCCQINVEEGRGKQWWNLRRTCFRIVEHNWFETFIVFMILLSSGALAFEDIYIDQRKTIKTMLEYADKVFTYIFILEMLLKWVAYGYQTYFTNAWCWLDFLIVDVSLVSLTANALGYSELGAIKSLRTLRALRPLRALSRFEGMRVVVNALLGAIPSIMNVLLVCLIFWLIFSIMGVNLFAGKFYHCINTTTGDRFDIEDVNNHTDGLKLIERNETARWKNVKVNFDNVGFGYLSLLQVATFKGWMDIMYAAVDSRNVELQPKYEKSLYMYLYFVIFIIFGSFFTLNLFIGVIIDNFNQQKKKFGGQDIFMTEEQKKYYNAMKKLGSKKPQKPIPRPGNKFQGMVFDFVTRQVFDISIMILICLNMVTMMVETDDQSEYVTTILSRINLVFIVLFTGECVLKLISLRHYYFTIGWNIFDFVVVILSIVGMFLAELIEKYFVSPTLFRVIRLARIGRILRLIKGAKGIRTLLFALMMSLPALFNIGLLLFLVMFIYAIFGMSNFAYVKREVGIDDMFNFETFGNSMICLFQITTSAGWDGLLAPILNSKPPDCDPNKVNPGSSVKGDCGNPSVGIFFFVSYIIISFLVVVNMYIAVILENFSVATEESAEPLSEDDFEMFYEVWEKFDPDATQFMEFEKLSQFAAALEPPLNLPQPNKLQLIAMDLPMVSGDRIHCLDILFAFTKRVLGESGEMDALRIQMEERFMASNPSKVSYQPITTTLKRKQEEVSAVIIQRAYRRHLLKRTVKQASFTYNKNKIKGGANLLIKEDMIIDRINENSITEKTDLTMSTAACPPSYDRVTKPIVEKHEQEGKDEKAKGK

SEQ ID NO: 35 - protein, 2009 aa, Homo sapiens
MEQTVLVPPGPDSFNFFTRESLAAIERRIAEEKAKNPKPDKKDDDENGPKPNSDLEAGKNLPFIYGDIPPEMVSEPLEDLDPYYINKKTFIVLNKLKAIFRFSATSALYILTPFNPLRKIAIKILVHSLFSMLIMCTILTNCVFMTMSNPPDWTKNVEYTFTGIYTFESLIKIIARGFCLEDFTFLRDPWNWLDFTVITFAYVTEFVDLGNVSALRTFRVLRALKTISVIPGLKTIVGALIQSVKKLSDVMILTVFCLSVFALIGLQLFMGNLRNKCIQWPPTNASLEEHSIEKNITVNYNGTLINETVFEFDWKSYIQDSRYHYFLEGFLDALLCGNSSDAGQCPEGYMCVKAGRNPNYGYTSFDTFSWAFLSLFRLMTQDFWENLYQLTLRAAGKTYMIFFVLVIFLGSFYLINLILAVVAMAYEEQNQATLEEAEQKEAEFQQMIEQLKKQQEAAQQAATATASEHSREPSAAGRLSDSSSEASKLSSKSAKERRNRRKKRKQKEQSGGEEKDEDEFQKSESEDSIRRKGFRFSIEGNRLTYEKRYSSPHQSLLSIRGSLFSPRRNSRTSLFSFRGRAKDVGSENDFADDEHSTFEDNESRRDSLFVPRRHGERRNSNLSQTSRSSRMLAVFPANGKMHSTVDCNGVVSLVGGPSVPTSPVGQLLPEVIIDKPATDDNGTTTETEMRKRRSSSFHVSMDFLEDPSQRQRAMSIASILTNTVEELEESRQKCPPCWYKFSNIFLIWDCSPYWLKVKHVVNLVVMDPFVDLAITICIVLNTLFMAMEHYPMTDHFNNVLTVGNLVFTGIFTAEMFLKIIAMDPYYYFQEGWNIFDGFIVTLSLVELGLANVEGLSVLRSFRLLRVFKLAKSWPTLNMLIKIIGNSVGALGNLTLVLAIIVFIFAVVGMQLFGKSYKDCVCKIASDCQLPRWHMNDFFHSFLIVFRVLCGEWIETMWDCMEVAGQAMCLTVFMMVMVIGNLVVLNLFLALLLSSFSADNLAATDDDNEMNNLQIAVDRMHKGVAYVKRKIYEFIQQSFIRKQKILDEIKPLDDLNNKKDSCMSNHTTEIGKDLDYLKDVNGTTSGIGTGSSVEKYIIDESDYMSFINNPSLTVTVPIAVGESDFENLNTEDFSSESDLEESKEKLNESSSSSEGSTVDIGAPVEEQPVVEPEETLEPEACFTEGCVQRFKCCQINVEEGRGKQWWNLRRTCFRIVEHNWFETFIVFMILLSSGALAFEDIYIDQRKTIKTMLEYADKVFTYIFILEMLLKWVAYGYQTYFTNAWCWLDFLIVDVSLVSLTANALGYSELGAIKSLRTLRALRPLRALSRFEGMRVVVNALLGAIPSIMNVLLVCLIFWLIFSIMGVNLFAGKFYHCINTTTGDRFDIEDVNNHTDCLKLIERNETARWKNVKVNFDNVGFGYLSLLQVATFKGWMDIMYAPVDSRNVELQPKYEKSLYMYLYFVIFIIFGSFFTLNLFIGVIIDNFNQQKKKFGGQDIFMTEEQKKYYNAMKKLGSKKPQKPIPRPGNKFQGMVFDFVTRQVFDISIMILICLNMVTMMVETDDQSEYVTTILSRINLVFIVLFTGECVLKLISLRHYYFTIGWNIFDFVVVILSIVGMFLAELIEKYFVSPTLFRVIRLARIGRILRLIKGAKGIRTLLFALMMSLPALFNIGLLLFLVMFIYAIFGMSNFAYVKREVGIDDMFNFETFGNSMICLFQITTSAGWDGLLAPILNSKPPDCDPNKVNPGSSVKGDCGNPSVGIFFFVSYIIISFLVVVNMYIAVILENFSVATEESAEPLSEDDFEMFYEVWEKFDPDATQFMEFEKLSQFAAALEPPLNLPQPNKLQLIAMDLPMVSGDRIHCLDILFAFTKRVLGESGEMDALRIQMEERFMASNPSKVSYQPITTTLKRKQEEVSAVIIQRAYRRHLLKRTVKQASFTYNKNKIKGGANLLIKEDMIIDRINENSITEKTDLTMSTAACPPSYDRVTKPIVEKHEQEGKDEKAKGK

SEQ ID NO: 36 - protein, 2009 aa, Homo sapiens
MEQTVLVPPGPDSFNFFTRESLAAIERRIAEEKAKNPKPDKKDDDENGPKPNSDLEAGKNLPFIYGDIPPEMVSEPLEDLDPYYINKKTFIVLNKLKAIFRFSATSALYILTPFNPLRKIAIKILVHSLFSMLIMCTILTNCVFMTMSNPPDWTKNVEYTFTGIYTFESLIKIIARGFCLEDFTFLRDPWNWLDFTVITFAYVTEFVDLGNVSALRTFRVLRALKTISVIPGLKTIVGALIQSVKKLSDVMILTVFCLSVFALIGLQLFMGNLRNKCIQWPPTNASLEEHSIEKNITVNYNGTLINETVFEFDWKSYIQDSRYHYFLEGFLDALLCGNSSDAGQCPEGYMCVKAGRNPNYGYTSFDTFSWAFLSLFRLMTQDFWENLYQLTLRAAGKTYMIFFVLVIFLGSFYLINLILAVVAMAYEEQNQATLEEAEQKEAEFQQMIEQLKKQQEAAQQAATATASEHSREPSAAGRLSDSSSEASKLSSKSAKERRNRRKKRKQKEQSGGEEKDEDEFQKSESEDSIRRKGFRFSIEGNRLTYEKRYSSPHQSLLSIRGSLFSPRRNSRTSLFSFRGRAKDVGSENDFADDEHSTFEDNESRRDSLFVPRRHGERRNSNLSQTSRSSRMLAVFPANGKMHSTVDCNGVVSLVGGPSVPTSPVGQLLPEVIIDKPATDDNGTTTETEMRKRRSSSFHVSMDFLEDPSQRQRAMSIASILTNTVEELEESRQKCPPCWYKFSNIFLIWDCSPYWLKVKHVVNLVVMDPFVDLAITICIVLNTLFMAMEHYPMTDHFNNVLTVGNLVFTGIFTAEMFLKIIAMDPYYYFQEGWNIFDGFIVTLSLVELGLANVEGLSVLRSFRLLRVFKLAKSWPTLNMLIKIIGNSVGALGNLTLVLAIIVFIFAVVGMQLFGKSYKDCVCKIASDCQLPRWHMNDFFHSFLIVFRVLCGEWIETMWDCMEVAGQAMCLTVFMMVMVIGNLVVLNLFLALLLSSFSADNLAATDDDNEMNNLQIAVDRMHKGVAYVKRKIYEFIQQSFIRKQKILDEIKPLDDLNNKKDSCMSNHTTEIGKDLDYLKDVNGTTSGIGTGSSVEKYIIDESDYMSFINNPSLTVTVPIAVGESDFENLNTEDFSSESDLEESKEKLNESSSSSEGSTVDIGAPVEEQPVVEPEETLEPEACFTEGCVQRFKCCQINVEEGRGKQWWNLRRTCFRIVEHNWFETFIVFMILLSSGALAFEDIYIDQRKTIKTMLEYADKVFTYIFILEMLLKWVAYGYQTYFTNAWCWLDFLIVDVSLVSLTANALGYSELGAIKSLRTLRALRPLRALSRFEGMRVVVNALLGAIPSIMNVLLVCLIFWLIFSIMGVNLFAGKFYHCINTTTGDRFDIEDVNNHTDCLKLIERNETARWKNVKVNFDNVGFGYLSLLQVATFKGWMDIMYAAVDSRNVELQPKYEKSLYMYLYFVIFIIFGSFFTLNLFIGVIIDNFNQQKKKFGGQDIFMTEEQKKYYNAMKKLGSKKPQKPIPRPGNKFQGMVFDFVTRQVFDVSIMILICLNMVTMMVETDDQSEYVTTILSRINLVFIVLFTGECVLKLISLRHYYFTIGWNIFDFVVVILSIVGMFLAELIEKYFVSPTLFRVIRLARIGRILRLIKGAKGIRTLLFALMMSLPALFNIGLLLFLVMFIYAIFGMSNFAYVKREVGIDDMFNFETFGNSMICLFQITTSAGWDGLLAPILNSKPPDCDPNKVNPGSSVKGDCGNPSVGIFFFVSYIIISFLVVVNMYIAVILENFSVATEESAEPLSEDDFEMFYEVWEKFDPDATQFMEFEKLSQFAAALEPPLNLPQPNKLQLIAMDLPMVSGDRIHCLDILFAFTKRVLGESGEMDALRIQMEERFMASNPSKVSYQPITTTLKRKQEEVSAVIIQRAYRRHLLKRTVKQASFTYNKNKIKGGANLLIKEDMIIDRINENSITEKTDLTMSTAACPPSYDRVTKPIVEKHEQEGKDEKAKGK

SEQ ID NO: 37 - protein, 2009 aa, Homo sapiens
MEQTVLVPPGPDSFNFFTRESLAAIERRIAEEKAKNPKPDKKDDDENGPKPNSDLEAGKNLPFIYGDIPPEMVSEPLEDLDPYYINKKTFIVLNKLKAIFRFSATSALYILTPFNPLRKIAIKILVHSLFSMLIMCTILTNCVFMTMSNPPDWTKNVEYTFTGIYTFESLIKIIARGFCLEDFTFLRDPWNWLDFTVITFAYVTEFVDLGNVSALRTFRVLRALKTISVIPGLKTIVGALIQSVKKLSDVMILTVFCLSVFALIGLQLFMGNLRNKCIQWPPTNASLEEHSIEKNITVNYNGTLINETVFEFDWKSYIQDSRYHYFLEGFLDALLCGNSSDAGQCPEGYMCVKAGRNPNYGYTSFDTFSWAFLSLFRLMTQDFWENLYQLTLRAAGKTYMIFFVLVIFLGSFYLINLILAVVAMAYEEQNQATLEEAEQKEAEFQQMIEQLKKQQEAAQQAATATASEHSREPSAAGRLSDSSSEASKLSSKSAKERRNRRKKRKQKEQSGGEEKDEDEFQKSESEDSIRRKGFRFSIEGNRLTYEKRYSSPHQSLLSIRGSLFSPRRNSRTSLFSFRGRAKDVGSENDFADDEHSTFEDNESRRDSLFVPRRHGERRNSNLSQTSRSSRMLAVFPANGKMHSTVDCNGVVSLVGGPSVPTSPVGQLLPEVIIDKPATDDNGTTTETEMRKRRSSSFHVSMDFLEDPSQRQRAMSIASILTNTVEELEESRQKCPPCWYKFSNIFLIWDCSPYWLKVKHVVNLVVMDPFVDLAITICIVLNTLFMAMEHYPMTDHFNNVLTVGNLVFTGIFTAEMFLKIIAMDPYYYFQEGWNIFDGFIVTLSLVELGLANVEGLSVLRSFRLLRVFKLAKSWPTLNMLIKIIGNSVGALGNLTLVLAIIVFIFAVVGMQLFGKSYKDCVCKIASDCQLPRWHMNDFFHSFLIVFRVLCGEWIETMWDCMEVAGQAMCLTVFMMVMVIGNLVVLNLFLALLLSSFSADNLAATDDDNEMNNLQIAVDRMHKGVAYVKRKIYEFIQQSFIRKQKILDEIKPLDDLNNKKDSCMSNHTTEIGKDLDYLKDVNGTTSGIGTGSSVEKYIIDESDYMSFINNPSLTVTVPIAVGESDFENLNTEDFSSESDLEESKEKLNESSSSSEGSTVDIGAPVEEQPVVEPEETLEPEACFTEGCVQRFKCCQINVEEGRGKQWWNLRRTCFRIVEHNWFETFIVFMILLSSGALAFEDIYIDQRKTIKTMLEYADKVFTYIFILEMLLKWVAYGYQTYFTNAWCWLDFLIVDVSLVSLTANALGYSELGAIKSLRTLRALRPLRALSRFEGMRVVVNALLGAIPSIMNVLLVCLIFWLIFSIMGVNLFAGKFYHCINTTTGDRFDIEDVNNHTDCLKLIERNETARWKNVKVNFDNVGFGYLSLLQVATFKGWMDIMYAAVDSRNVELQPKYEKSLYMYLYFVIFIIFGSFFTLNLFIGVIIDNFNQQKKKFGGQDIFMTEEQKKYYNAMKKLGSKKPQKPIPRPGNKFQGMVFDFVTRQVFDISIMILICLNMVTMMVETDDQSEYVTTILSRINLVFIVLFTGECVLKLISLRHYYFTIGWNIFDFVVVILSIVGMFLAELIEKYFVSPTLFRVIRLARIGQILRLIKGAKGIRTLLFALMMSLPALFNIGLLLFLVMFIYAIFGMSNFAYVKREVGIDDMFNFETFGNSMICLFQITTSAGWDGLLAPILNSKPPDCDPNKVNPGSSVKGDCGNPSVGIFFFVSYIIISFLVVVNMYIAVILENFSVATEESAEPLSEDDFEMFYEVWEKFDPDATQFMEFEKLSQFAAALEPPLNLPQPNKLQLIAMDLPMVSGDRIHCLDILFAFTKRVLGESGEMDALRIQMEERFMASNPSKVSYQPITTTLKRKQEEVSAVIIQRAYRRHLLKRTVKQASFTYNKNKIKGGANLLIKEDMIIDRINENSITEKTDLTMSTAACPPSYDRVTKPIVEKHEQEGKDEKAKGK

SEQ ID NO: 38 - protein, 2009 aa, Homo sapiens
MEQTVLVPPGPDSFNFFTRESLAAIERRIAEEKAKNPKPDKKDDDENGPKPNSDLEAGKNLPFIYGDIPPEMVSEPLEDLDPYYINKKTFIVLNKLKAIFRFSATSALYILTPFNPLRKIAIKILVHSLFSMLIMCTILTNCVFMTMSNPPDWTKNVEYTFTGIYTFESLIKIIARGFCLEDFTFLRDPWNWLDFTVITFAYVTEFVDLGNVSALRTFRVLRALKTISVIPGLKTIVGALIQSVKKLSDVMILTVFCLSVFALIGLQLFMGNLRNKCIQWPPTNASLEEHSIEKNITVNYNGTLINETVFEFDWKSYIQDSRYHYFLEGFLDALLCGNSSDAGQCPEGYMCVKAGRNPNYGYTSFDTFSWAFLSLFRLMTQDFWENLYQLTLRAAGKTYMIFFVLVIFLGSFYLINLILAVVAMAYEEQNQATLEEAEQKEAEFQQMIEQLKKQQEAAQQAATATASEHSREPSAAGRLSDSSSEASKLSSKSAKERRNRRKKRKQKEQSGGEEKDEDEFQKSESEDSIRRKGFRFSIEGNRLTYEKRYSSPHQSLLSIRGSLFSPRRNSRTSLFSFRGRAKDVGSENDFADDEHSTFEDNESRRDSLFVPRRHGERRNSNLSQTSRSSRMLAVFPANGKMHSTVDCNGVVSLVGGPSVPTSPVGQLLPEVIIDKPATDDNGTTTETEMRKRRSSSFHVSMDFLEDPSQRQRAMSIASILTNTVEELEESRQKCPPCWYKFSNIFLIWDCSPYWLKVKHVVNLVVMDPFVDLAITICIVLNTLFMAMEHYPMTDHFNNVLTVGNLVFTGIFTAEMFLKIIAMDPYYYFQEGWNIFDGFIVTLSLVELGLANVEGLSVLRSFRLLRVFKLAKSWPTLNMLIKIIGNSVGALGNLTLVLAIIVFIFAVVGMQLFGKSYKDCVCKIASDCQLPRWHMNDFFHSFLIVFRVLCGEWIETMWDCMEVAGQAMCLTVFMMVMVIGNLVVLNLFLALLLSSFSADNLAATDDDNEMNNLQIAVDRMHKGVAYVKRKIYEFIQQSFIRKQKILDEIKPLDDLNNKKDSCMSNHTTEIGKDLDYLKDVNGTTSGIGTGSSVEKYIIDESDYMSFINNPSLTVTVPIAVGESDFENLNTEDFSSESDLEESKEKLNESSSSSEGSTVDIGAPVEEQPVVEPEETLEPEACFTEGCVQRFKCCQINVEEGRGKQWWNLRRTCFRIVEHNWFETFIVFMILLSSGALAFEDIYIDQRKTIKTMLEYADKVFTYIFILEMLLKWVAYGYQTYFTNAWCWLDFLIVDVSLVSLTANALGYSELGAIKSLRTLRALRPLRALSRFEGMRVVVNALLGAIPSIMNVLLVCLIFWLIFSIMGVNLFAGKFYHCINTTTGDRFDIEDVNNHTDCLKLIERNETARWKNVKVNFDNVGFGYLSLLQVATFKGWMDIMYAAVDSRNVELQPKYEKSLYMYLYFVIFIIFGSFFTLNLFIGVIIDNFNQQKKKFGGQDIFMTEEQKKYYNAMKKLGSKKPQKPIPRPGNKFQGMVFDFVTRQVFDISIMILICLNMVTMMVETDDQSEYVTTILSRINLVFIVLFTGECVLKLISLRHYYFTIGWNIFDFVVVILSIVGMFLAELIEKYFVSPTLFRVIRLARIGRILRLIKGAKGIRTLLFALMMSLPALFNIGLLLFLVMFIYAIFGMSNFAYVKREVGIDDMFNVETFGNSMICLFQITTSAGWDGLLAPILNSKPPDCDPNKVNPGSSVKGDCGNPSVGIFFFVSYIIISFLVVVNMYIAVILENFSVATEESAEPLSEDDFEMFYEVWEKFDPDATQFMEFEKLSQFAAALEPPLNLPQPNKLQLIAMDLPMVSGDRIHCLDILFAFTKRVLGESGEMDALRIQMEERFMASNPSKVSYQPITTTLKRKQEEVSAVIIQRAYRRHLLKRTVKQASFTYNKNKIKGGANLLIKEDMIIDRINENSITEKTDLTMSTAACPPSYDRVTKPIVEKHEQEGKDEKAKGK

SEQ ID NO: 39 - protein, 2009 aa, Homo sapiens
MEQTVLVPPGPDSFNFFTRESLAAIERRIAEEKAKNPKPDKKDDDENGPKPNSDLEAGKNLPFIYGDIPPEMVSEPLEDLDPYYINKKTFIVLNKLKAIFRFSATSALYILTPFNPLRKIAIKILVHSLFSMLIMCTILTNCVFMTMSNPPDWTKNVEYTFTGIYTFESLIKIIARGFCLEDFTFLRDPWNWLDFTVITFAYVTEFVDLGNVSALRTFRVLRALKTISVIPGLKTIVGALIQSVKKLSDVMILTVFCLSVFALIGLQLFMGNLRNKCIQWPPTNASLEEHSIEKNITVNYNGTLINETVFEFDWKSYIQDSRYHYFLEGFLDALLCGNSSDAGQCPEGYMCVKAGRNPNYGYTSFDTFSWAFLSLFRLMTQDFWENLYQLTLRAAGKTYMIFFVLVIFLGSFYLINLILAVVAMAYEEQNQATLEEAEQKEAEFQQMIEQLKKQQEAAQQAATATASEHSREPSAAGRLSDSSSEASKLSSKSAKERRNRRKKRKQKEQSGGEEKDEDEFQKSESEDSIRRKGFRFSIEGNRLTYEKRYSSPHQSLLSIRGSLFSPRRNSRTSLFSFRGRAKDVGSENDFADDEHSTFEDNESRRDSLFVPRRHGERRNSNLSQTSRSSRMLAVFPANGKMHSTVDCNGVVSLVGGPSVPTSPVGQLLPEVIIDKPATDDNGTTTETEMRKRRSSSFHVSMDFLEDPSQRQRAMSIASILTNTVEELEESRQKCPPCWYKFSNIFLIWDCSPYWLKVKHVVNLVVMDPFVDLAITICIVLNTLFMAMEHYPMTDHFNNVLTVGNLVFTGIFTAEMFLKIIAMDPYYYFQEGWNIFDGFIVTLSLVELGLANVEGLSVLRSFRLLRVFKLAKSWPTLNMLIKIIGNSVGALGNLTLVLAIIVFIFAVVGMQLFGKSYKDCVCKIASDCQLPRWHMNDFFHSFLIVFRVLCGEWIETMWDCMEVAGQAMCLTVFMMVMVIGNLVVLNLFLALLLSSFSADNLAATDDDNEMNNLQIAVDRMHKGVAYVKRKIYEFIQQSFIRKQKILDEIKPLDDLNNKKDSCMSNHTTEIGKDLDYLKDVNGTTSGIGTGSSVEKYIIDESDYMSFINNPSLTVTVPIAVGESDFENLNTEDFSSESDLEESKEKLNESSSSSEGSTVDIGAPVEEQPVVEPEETLEPEACFTEGCVQRFKCCQINVEEGRGKQWWNLRRTCFRIVEHNWFETFIVFMILLSSGALAFEDIYIDQRKTIKTMLEYADKVFTYIFILEMLLKWVAYGYQTYFTNAWCWLDFLIVDVSLVSLTANALGYSELGAIKSLRTLRALRPLRALSRFEGMRVVVNALLGAIPSIMNVLLVCLIFWLIFSIMGVNLFAGKFYHCINTTTGDRFDIEDVNNHTDCLKLIERNETARWKNVKVNFDNVGFGYLSLLQVATFKGWMDIMYAAVDSRNVELQPKYEKSLYMYLYFVIFIIFGSFFTLNLFIGVIIDNFNQQKKKFGGQDIFMTEEQKKYYNAMKKLGSKKPQKPIPRPGNKFQGMVFDFVTRQVFDISIMILICLNMVTMMVETDDQSEYVTTILSRINLVFIVLFTGECVLKLISLRHYYFTIGWNIFDFVVVILSIVGMFLAELIEKYFVSPTLFRVIRLARIGRILRLIKGAKGIRTLLFALMMSLPALFNIGLLLFLVMFIYAIFGMSNFAYVKREVGIDDMFNFETFGNSMICLFQITTSAGWDGLLAPILNSKPPDCDPNKVNPGSSVKGDCGNPSVGIFFFVSYIIISFLVVVNMYITVILENFSVATEESAEPLSEDDFEMFYEVWEKFDPDATQFMEFEKLSQFAAALEPPLNLPQPNKLQLIAMDLPMVSGDRIHCLDILFAFTKRVLGESGEMDALRIQMEERFMASNPSKVSYQPITTTLKRKQEEVSAVIIQRAYRRHLLKRTVKQASFTYNKNKIKGGANLLIKEDMIIDRINENSITEKTDLTMSTAACPPSYDRVTKPIVEKHEQEGKDEKAKGK

SEQ ID NO: 40 - protein, 90 aa, Homo sapiens
MEQTVLVPPGPDSSTSSPENLLRLLKDALQKKRQRIPNQTKKMTTKMAQSQIVTWKLERTFHLFMETFLQRWCQSPWRTWTPTISIRKLL

SEQ ID NO: 41 - protein, 169 aa, Homo sapiens
MEQTVLVPPGPDSFNFFTRESLAAIERRIAEEKAKNPKPDKKDDDENGPKPNSDLEAGKNLPFIYGDIPPEMVSEPLEDLDPYYINKKTFIVLNKLKAIFRFSATSALYILTPFNPLRKIAIKILVHSLFSMLIMCTILTNCVFMTMSNPPDWTKNVEYTFTGIYSESF

SEQ ID NO: 42 - protein, 621 aa, Homo sapiens
MEQTVLVPPGPDSFNFFTRESLAAIERRIAEEKAKNPKPDKKDDDENGPKPNSDLEAGKNLPFIYGDIPPEMVSEPLEDLDPYYINKKTFIVLNKLKAIFRFSATSALYILTPFNPLRKIAIKILVHSLFSMLIMCTILTNCVFMTMSNPPDWTKNVEYTFTGIYTFESLIKIIARGFCLEDFTFLRDPWNWLDFTVITFAYVTEFVDLGNVSALRTFRVLRALKTISVIPGLKTIVGALIQSVKKLSDVMILTVFCLSVFALIGLQLFMGNLRNKCIQWPPTNASLEEHSIEKNITVNYNGTLINETVFEFDWKSYIQDSRYHYFLEGFLDALLCGNSSDAGQCPEGYMCVKAGRNPNYGYTSFDTFSWAFLSLFRLMTQDFWENLYQLTLRAAGKTYMIFFVLVIFLGSFYLINLILAVVAMAYEEQNQATLEEAEQKEAEFQQMIEQLKKQQEAAQQAATATASEHSREPSAAGRLSDSSSEASKLSSKSAKERRNRRKKRKQKEQSGGEEKDEDEFQKSESEDSIRRKGFRFSIEGNRLTYEKRYSSPHQSLLSIRGSYFHQGEIAEQAFSALEGEQRMWDLRTTSQMMSTAPLRITRAVEIPCLCPDDTERDATAT

SEQ ID NO: 43 - protein, 1078 aa, Homo sapiens
MEQTVLVPPGPDSFNFFTRESLAAIERRIAEEKAKNPKPDKKDDDENGPKPNSDLEAGKNLPFIYGDIPPEMVSEPLEDLDPYYINKKTFIVLNKLKAIFRFSATSALYILTPFNPLRKIAIKILVHSLFSMLIMCTILTNCVFMTMSNPPDWTKNVEYTFTGIYTFESLIKIIARGFCLEDFTFLRDPWNWLDFTVITFAYVTEFVDLGNVSALRTFRVLRALKTISVIPGLKTIVGALIQSVKKLSDVMILTVFCLSVFALIGLQLFMGNLRNKCIQWPPTNASLEEHSIEKNITVNYNGTLINETVFEFDWKSYIQDSRYHYFLEGFLDALLCGNSSDAGQCPEGYMCVKAGRNPNYGYTSFDTFSWAFLSLFRLMTQDFWENLYQLTLRAAGKTYMIFFVLVIFLGSFYLINLILAVVAMAYEEQNQATLEEAEQKEAEFQQMIEQLKKQQEAAQQAATATASEHSREPSAAGRLSDSSSEASKLSSKSAKERRNRRKKRKQKEQSGGEEKDEDEFQKSESEDSIRRKGFRFSIEGNRLTYEKRYSSPHQSLLSIRGSLFSPRRNSRTSLFSFRGRAKDVGSENDFADDEHSTFEDNESRRDSLFVPRRHGERRNSNLSQTSRSSRMLAVFPANGKMHSTVDCNGVVSLVGGPSVPTSPVGQLLPEVIIDKPATDDNGTTTETEMRKRRSSSFHVSMDFLEDPSQRQRAMSIASILTNTVEELEESRQKCPPCWYKFSNIFLIWDCSPYWLKVKHVVNLVVMDPFVDLAITICIVLNTLFMAMEHYPMTDHFNNVLTVGNLVFTGIFTAEMFLKIIAMDPYYYFQEGWNIFDGFIVTLSLVELGLANVEGLSVLRSFRLLRVFKLAKSWPTLNMLIKIIGNSVGALGNLTLVLAIIVFIFAVVGMQLFGKSYKDCVCKIASDCQLPRWHMNDFFHSFLIVFRVLCGEWIETMWDCMEVAGQAMCLTVFMMVMVIGNLVVLNLFLALLLSSFSADNLAATDDDNEMNNLQIAVDRMHKGVAYVKRKIYEFIQQSFIRKQKILDEIKPLDDLNNKKDSCMSNHTTEIGKDLDYLKM

SEQ ID NO: 44 - protein, 1214 aa, Homo sapiens
MEQTVLVPPGPDSFNFFTRESLAAIERRIAEEKAKNPKPDKKDDDENGPKPNSDLEAGKNLPFIYGDIPPEMVSEPLEDLDPYYINKKTFIVLNKLKAIFRFSATSALYILTPFNPLRKIAIKILVHSLFSMLIMCTILTNCVFMTMSNPPDWTKNVEYTFTGIYTFESLIKIIARGFCLEDFTFLRDPWNWLDFTVITFAYVTEFVDLGNVSALRTFRVLRALKTISVIPGLKTIVGALIQSVKKLSDVMILTVFCLSVFALIGLQLFMGNLRNKCIQWPPTNASLEEHSIEKNITVNYNGTLINETVFEFDWKSYIQDSRYHYFLEGFLDALLCGNSSDAGQCPEGYMCVKAGRNPNYGYTSFDTFSWAFLSLFRLMTQDFWENLYQLTLRAAGKTYMIFFVLVIFLGSFYLINLILAVVAMAYEEQNQATLEEAEQKEAEFQQMIEQLKKQQEAAQQAATATASEHSREPSAAGRLSDSSSEASKLSSKSAKERRNRRKKRKQKEQSGGEEKDEDEFQKSESEDSIRRKGFRFSIEGNRLTYEKRYSSPHQSLLSIRGSLFSPRRNSRTSLFSFRGRAKDVGSENDFADDEHSTFEDNESRRDSLFVPRRHGERRNSNLSQTSRSSRMLAVFPANGKMHSTVDCNGVVSLVGGPSVPTSPVGQLLPEVIIDKPATDDNGTTTETEMRKRRSSSFHVSMDFLEDPSQRQRAMSIASILTNTVEELEESRQKCPPCWYKFSNIFLIWDCSPYWLKVKHVVNLVVMDPFVDLAITICIVLNTLFMAMEHYPMTDHFNNVLTVGNLVFTGIFTAEMFLKIIAMDPYYYFQEGWNIFDGFIVTLSLVELGLANVEGLSVLRSFRLLRVFKLAKSWPTLNMLIKIIGNSVGALGNLTLVLAIIVFIFAVVGMQLFGKSYKDCVCKIASDCQLPRWHMNDFFHSFLIVFRVLCGEWIETMWDCMEVAGQAMCLTVFMMVMVIGNLVVLNLFLALLLSSFSADNLAATDDDNEMNNLQIAVDRMHKGVAYVKRKIYEFIQQSFIRKQKILDEIKPLDDLNNKKDSCMSNHTTEIGKDLDYLKDVNGTTSGIGTGSSVEKYIIDESDYMSFINNPSLTVTVPIAVGESDFENLNTEDFSSESDLEESKEKLNESSSSSEGSTVDIGAPVEEQPVVEPEETLEPEACFTEGCVQIQVLSNQCGRRQRKTMVEPEKDVFPNS

SEQ ID NO: 45 - protein, 1358 aa, Homo sapiens
MEQTVLVPPGPDSFNFFTRESLAAIERRIAEEKAKNPKPDKKDDDENGPKPNSDLEAGKNLPFIYGDIPPEMVSEPLEDLDPYYINKKTFIVLNKLKAIFRFSATSALYILTPFNPLRKIAIKILVHSLFSMLIMCTILTNCVFMTMSNPPDWTKNVEYTFTGIYTFESLIKIIARGFCLEDFTFLRDPWNWLDFTVITFAYVTEFVDLGNVSALRTFRVLRALKTISVIPGLKTIVGALIQSVKKLSDVMILTVFCLSVFALIGLQLFMGNLRNKCIQWPPTNASLEEHSIEKNITVNYNGTLINETVFEFDWKSYIQDSRYHYFLEGFLDALLCGNSSDAGQCPEGYMCVKAGRNPNYGYTSFDTFSWAFLSLFRLMTQDFWENLYQLTLRAAGKTYMIFFVLVIFLGSFYLINLILAVVAMAYEEQNQATLEEAEQKEAEFQQMIEQLKKQQEAAQQAATATASEHSREPSAAGRLSDSSSEASKLSSKSAKERRNRRKKRKQKEQSGGEEKDEDEFQKSESEDSIRRKGFRFSIEGNRLTYEKRYSSPHQSLLSIRGSLFSPRRNSRTSLFSFRGRAKDVGSENDFADDEHSTFEDNESRRDSLFVPRRHGERRNSNLSQTSRSSRMLAVFPANGKMHSTVDCNGVVSLVGGPSVPTSPVGQLLPEVIIDKPATDDNGTTTETEMRKRRSSSFHVSMDFLEDPSQRQRAMSIASILTNTVEELEESRQKCPPCWYKFSNIFLIWDCSPYWLKVKHVVNLVVMDPFVDLAITICIVLNTLFMAMEHYPMTDHFNNVLTVGNLVFTGIFTAEMFLKIIAMDPYYYFQEGWNIFDGFIVTLSLVELGLANVEGLSVLRSFRLLRVFKLAKSWPTLNMLIKIIGNSVGALGNLTLVLAIIVFIFAVVGMQLFGKSYKDCVCKIASDCQLPRWHMNDFFHSFLIVFRVLCGEWIETMWDCMEVAGQAMCLTVFMMVMVIGNLVVLNLFLALLLSSFSADNLAATDDDNEMNNLQIAVDRMHKGVAYVKRKIYEFIQQSFIRKQKILDEIKPLDDLNNKKDSCMSNHTTEIGKDLDYLKDVNGTTSGIGTGSSVEKYIIDESDYMSFINNPSLTVTVPIAVGESDFENLNTEDFSSESDLEESKEKLNESSSSSEGSTVDIGAPVEEQPVVEPEETLEPEACFTEGCVQRFKCCQINVEEGRGKQWWNLRRTCFRIVEHNWFETFIVFMILLSSGALAFEDIYIDQRKTIKTMLEYADKVFTYIFILEMLLKWVAYGYQTYFTNAWCWLDFLIVDVSLVSLTANALGYSELGAIKSLRTLRALRPLRALSRFEGMRVVVNALLGAIPSIMNVLLVCLYSG

SEQ ID NO: 46 - protein, 1510 aa, Homo sapiens
MEQTVLVPPGPDSFNFFTRESLAAIERRIAEEKAKNPKPDKKDDDENGPKPNSDLEAGKNLPFIYGDIPPEMVSEPLEDLDPYYINKKTFIVLNKLKAIFRFSATSALYILTPFNPLRKIAIKILVHSLFSMLIMCTILTNCVFMTMSNPPDWTKNVEYTFTGIYTFESLIKIIARGFCLEDFTFLRDPWNWLDFTVITFAYVTEFVDLGNVSALRTFRVLRALKTISVIPGLKTIVGALIQSVKKLSDVMILTVFCLSVFALIGLQLFMGNLRNKCIQWPPTNASLEEHSIEKNITVNYNGTLINETVFEFDWKSYIQDSRYHYFLEGFLDALLCGNSSDAGQCPEGYMCVKAGRNPNYGYTSFDTFSWAFLSLFRLMTQDFWENLYQLTLRAAGKTYMIFFVLVIFLGSFYLINLILAVVAMAYEEQNQATLEEAEQKEAEFQQMIEQLKKQQEAAQQAATATASEHSREPSAAGRLSDSSSEASKLSSKSAKERRNRRKKRKQKEQSGGEEKDEDEFQKSESEDSIRRKGFRFSIEGNRLTYEKRYSSPHQSLLSIRGSLFSPRRNSRTSLFSFRGRAKDVGSENDFADDEHSTFEDNESRRDSLFVPRRHGERRNSNLSQTSRSSRMLAVFPANGKMHSTVDCNGVVSLVGGPSVPTSPVGQLLPEVIIDKPATDDNGTTTETEMRKRRSSSFHVSMDFLEDPSQRQRAMSIASILTNTVEELEESRQKCPPCWYKFSNIFLIWDCSPYWLKVKHVVNLVVMDPFVDLAITICIVLNTLFMAMEHYPMTDHFNNVLTVGNLVFTGIFTAEMFLKIIAMDPYYYFQEGWNIFDGFIVTLSLVELGLANVEGLSVLRSFRLLRVFKLAKSWPTLNMLIKIIGNSVGALGNLTLVLAIIVFIFAVVGMQLFGKSYKDCVCKIASDCQLPRWHMNDFFHSFLIVFRVLCGEWIETMWDCMEVAGQAMCLTVFMMVMVIGNLVVLNLFLALLLSSFSADNLAATDDDNEMNNLQIAVDRMHKGVAYVKRKIYEFIQQSFIRKQKILDEIKPLDDLNNKKDSCMSNHTTEIGKDLDYLKDVNGTTSGIGTGSSVEKYIIDESDYMSFINNPSLTVTVPIAVGESDFENLNTEDFSSESDLEESKEKLNESSSSSEGSTVDIGAPVEEQPVVEPEETLEPEACFTEGCVQRFKCCQINVEEGRGKQWWNLRRTCFRIVEHNWFETFIVFMILLSSGALAFEDIYIDQRKTIKTMLEYADKVFTYIFILEMLLKWVAYGYQTYFTNAWCWLDFLIVDVSLVSLTANALGYSELGAIKSLRTLRALRPLRALSRFEGMRVVVNALLGAIPSIMNVLLVCLIFWLIFSIMGVNLFAGKFYHCINTTTGDRFDIEDVNNHTDCLKLIERNETARWKNVKVNFDNVGFGYLSLLQVATFKGWMDIMYAAVDSRNVELQPKYEKSLYMYLYFVIFIIFGSFFTLNLFIGVIIDNFNQQKKKFGGQDIFMTEEQKKYYMQ

SEQ ID NO: 47 - protein, 1007 aa, Homo sapiens
MEQTVLVPPGPDSFNFFTRESLAAIERRIAEEKAKNPKPDKKDDDENGPKPNSDLEAGKNLPFIYGDIPPEMVSEPLEDLDPYYINKKTFIVLNKLKAIFRFSATSALYILTPFNPLRKIAIKILVHSLFSMLIMCTILTNCVFMTMSNPPDWTKNVEYTFTGIYTFESLIKIIARGFCLEDFTFLRDPWNWLDFTVITFAYVTEFVDLGNVSALRTFRVLRALKTISVIPGLKTIVGALIQSVKKLSDVMILTVFCLSVFALIGLQLFMGNLRNKCIQWPPTNASLEEHSIEKNITVNYNGTLINETVFEFDWKSYIQDSRYHYFLEGFLDALLCGNSSDAGQCPEGYMCVKAGRNPNYGYTSFDTFSWAFLSLFRLMTQDFWENLYQLTLRAAGKTYMIFFVLVIFLGSFYLINLILAVVAMAYEEQNQATLEEAEQKEAEFQQMIEQLKKQQEAAQQAATATASEHSREPSAAGRLSDSSSEASKLSSKSAKERRNRRKKRKQKEQSGGEEKDEDEFQKSESEDSIRRKGFRFSIEGNRLTYEKRYSSPHQSLLSIRGSLFSPRRNSRTSLFSFRGRAKDVGSENDFADDEHSTFEDNESRRDSLFVPRRHGERRNSNLSQTSRSSRMLAVFPANGKMHSTVDCNGVVSLVGGPSVPTSPVGQLLPEVIIDKPATDDNGTTTETEMRKRRSSSFHVSMDFLEDPSQRQRAMSIASILTNTVEELEESRQKCPPCWYKFSNIFLIWDCSPYWLKVKHVVNLVVMDPFVDLAITICIVLNTLFMAMEHYPMTDHFNNVLTVGNLVFTGIFTAEMFLKIIAMDPYYYFQEGWNIFDGFIVTLSLVELGLANVEGLSVLRSFRLLRVFKLAKSWPTLNMLIKIIGNSVGALGNLTLVLAIIVFIFAVVGMQLFGKSYKDCVCKIASDCQLPRWHMNDFFHSFLIVFRVLCGEWIETMWDCMEVAGQAMCLTVFMMVMVIGNLVVLNLFLALLLSSFSADNLAATDDDN

SEQ ID NO: 48 - protein, 1426 aa, Homo sapiens
MEQTVLVPPGPDSFNFFTRESLAAIERRIAEEKAKNPKPDKKDDDENGPKPNSDLEAGKNLPFIYGDIPPEMVSEPLEDLDPYYINKKTFIVLNKLKAIFRFSATSALYILTPFNPLRKIAIKILVHSLFSMLIMCTILTNCVFMTMSNPPDWTKNVEYTFTGIYTFESLIKIIARGFCLEDFTFLRDPWNWLDFTVITFAYVTEFVDLGNVSALRTFRVLRALKTISVIPGLKTIVGALIQSVKKLSDVMILTVFCLSVFALIGLQLFMGNLRNKCIQWPPTNASLEEHSIEKNITVNYNGTLINETVFEFDWKSYIQDSRYHYFLEGFLDALLCGNSSDAGQCPEGYMCVKAGRNPNYGYTSFDTFSWAFLSLFRLMTQDFWENLYQLTLRAAGKTYMIFFVLVIFLGSFYLINLILAVVAMAYEEQNQATLEEAEQKEAEFQQMIEQLKKQQEAAQQAATATASEHSREPSAAGRLSDSSSEASKLSSKSAKERRNRRKKRKQKEQSGGEEKDEDEFQKSESEDSIRRKGFRFSIEGNRLTYEKRYSSPHQSLLSIRGSLFSPRRNSRTSLFSFRGRAKDVGSENDFADDEHSTFEDNESRRDSLFVPRRHGERRNSNLSQTSRSSRMLAVFPANGKMHSTVDCNGVVSLVGGPSVPTSPVGQLLPEVIIDKPATDDNGTTTETEMRKRRSSSFHVSMDFLEDPSQRQRAMSIASILTNTVEELEESRQKCPPCWYKFSNIFLIWDCSPYWLKVKHVVNLVVMDPFVDLAITICIVLNTLFMAMEHYPMTDHFNNVLTVGNLVFTGIFTAEMFLKIIAMDPYYYFQEGWNIFDGFIVTLSLVELGLANVEGLSVLRSFRLLRVFKLAKSWPTLNMLIKIIGNSVGALGNLTLVLAIIVFIFAVVGMQLFGKSYKDCVCKIASDCQLPRWHMNDFFHSFLIVFRVLCGEWIETMWDCMEVAGQAMCLTVFMMVMVIGNLVVLNLFLALLLSSFSADNLAATDDDNEMNNLQIAVDRMHKGVAYVKRKIYEFIQQSFIRKQKILDEIKPLDDLNNKKDSCMSNHTTEIGKDLDYLKDVNGTTSGIGTGSSVEKYIIDESDYMSFINNPSLTVTVPIAVGESDFENLNTEDFSSESDLEESKEKLNESSSSSEGSTVDIGAPVEEQPVVEPEETLEPEACFTEGCVQRFKCCQINVEEGRGKQWWNLRRTCFRIVEHNWFETFIVFMILLSSGALAFEDIYIDQRKTIKTMLEYADKVFTYIFILEMLLKWVAYGYQTYFTNAWCWLDFLIVDVSLVSLTANALGYSELGAIKSLRTLRALRPLRALSRFEGMRVVVNALLGAIPSIMNVLLVCLIFWLIFSIMGVNLFAGKFYHCINTTTGDRFDIEDVNNHTDCLKLIERNETARWKNVKVNFDNVGFGYLSLL

SEQ ID NO: 49 - DNA, 8381 bp, Homo sapiens
atactgcagaggtctctggtgcatgtgtgtatgtgtgcgtttgtgtgtgtttgtgtgtctgtgtgttctgccccagtgagactgcagcccttgtaaatactttgacaccttttgcaagaaggaatctgaacaattgcaactgaaggcacattgttatcatctcgtctttgggtgatgctgttcctcactgcagatggataattttccttttaatcaggaatttcatatgcagaataaatggtaattaaaatgtgcaggatgacaagatggagcaaacagtgcttgtaccaccaggacctgacagcttcaacttcttcaccagagaatctcttgcggctattgaaagacgcattgcagaagaaaaggcaaagaatcccaaaccagacaaaaaagatgacgacgaaaatggcccaaagccaaatagtgacttggaagctggaaagaaccttccatttatttatggagacattcctccagagatggtgtcagagcccctggaggacctggacccctactatatcaataagaaaacttttatagtattgaataaattgaaggccatcttccggttcagtgccacctctgccctgtacattttaactcccttcaatcctcttaggaaaatagctattaagattttggtacattcattattcagcatgctaattatgtgcactattttgacaaactgtgtgtttatgacaatgagtaaccctcctgattggacaaagaatgtagaatacaccttcacaggaatatatacttttgaatcacttataaaaattattgcaaggggattctgtttagaagattttactttccttcgggatccatggaactggctcaatttcactgtcattacatttgcgtacgtcacagagtttgtggacctgggcaatgtctcggcattgagaacattcagagttctccgagcattgaagacgatttcagtcattccaggcctgaaaaccattgtgggagccctgatccagtctgtgaagaagctctcagatgtaatgatcctgactgtgttctgtctgagcgtatttgctctaattgggctgcagctgttcatgggcaacctgaggaataaatgtatacaatggcctcccaccaatgcttccttggaggaacatagtatagaaaagaatataactgtgaattataatggtacacttataaatgaaactgtctttgagtttgactggaagtcatatattcaagattcaagatatcattatttcctggagggttttttagatgcactactatgtggaaatagctctgatgcaggccaatgtccagagggatatatgtgtgtgaaagctggtagaaatcccaattatggctacacaagctttgataccttcagttgggcttttttgtccttgtttcgactaatgactcaggacttctgggaaaatctttatcaactgacattacgtgctgctgggaaaacgtacatgatattttttgtattggtcattttcttgggctcattctacctaataaatttgatcctggctgtggtggccatggcctacgaggaacagaatcaggccaccttggaagaagcagaacagaaagaggccgaatttcagcagatgattgaacagcttaaaaagcaacaggaggcagctcagcaggcagcaacggcaactgcctcagaacattccagagagcccagtgcagcaggcaggctctcagacagctcatctgaagcctctaagttgagttccaagagtgctaaggaaagaagaaatcggaggaagaaaagaaaacagaaagagcagtctggtggggaagagaaagatgaggatgaattccaaaaatctgaatctgaggacagcatcaggaggaaaggttttcgcttctccattgaagggaaccgattgacatatgaaaagaggtactcctccccacaccagtctttgttgagcatccgtggctccctattttcaccaaggcgaaatagcagaacaagccttttcagctttagagggcgagcaaaggatgtgggatctgagaacgacttcgcagatgatgagcacagcacctttgaggataacgagagccgtagagattccttgtttgtgccccgacgacacggagagagacgcaacagcaacctgagtcagaccagtaggtcatcccggatgctggcagtgtttccagcgaatgggaagatgcacagcactgtggattgcaatggtgtggtttccttggttggtggaccttcagttcctacatcgcctgttggacagcttctgccagaggtgataatagataagccagctactgatgacaatggaacaaccactgaaactgaaatgagaaagagaaggtcaagttctttccacgtttccatggactttctagaagatccttcccaaaggcaacgagcaatgagtatagccagcattctaacaaatacagtagaagaacttgaagaatccaggcagaaatgcccaccctgttggtataaattttccaacatattcttaatctgggactgttctccatattggttaaaagtgaaacatgttgtcaacctggttgtgatggacccatttgttgacctggccatcaccatctgtattgtcttaaatactcttttcatggccatggagcactatccaatgacggaccatttcaataatgtgcttacagtaggaaacttggttttcactgggatctttacagcagaaatgtttctgaaaattattgccatggatccttactattatttccaagaaggctggaatatctttgacggttttattgtgacgcttagcctggtagaacttggactcgccaatgtggaaggattatctgttctccgttcatttcgattgctgcgagttttcaagttggcaaaatcttggccaacgttaaatatgctaataaagatcatcggcaattccgtgggggctctgggaaatttaaccctcgtcttggccatcatcgtcttcatttttgccgtggtcggcatgcagctctttggtaaaagctacaaagattgtgtctgcaagatcgccagtgattgtcaactcccacgctggcacatgaatgacttcttccactccttcctgattgtgttccgcgtgctgtgtggggagtggatagagaccatgtgggactgtatggaggttgctggtcaagccatgtgccttactgtcttcatgatggtcatggtgattggaaacctagtggtcctgaatctctttctggccttgcttctgagctcatttagtgcagacaaccttgcagccactgatgatgataatgaaatgaataatctccaaattgctgtggataggatgcacaaaggagtagcttatgtgaaaagaaaaatatatgaatttattcaacagtccttcattaggaaacaaaagattttagatgaaattaaaccacttgatgatctaaacaacaagaaagacagttgtatgtccaatcatacaacagaaattgggaaagatcttgactatcttaaagatgtaaatggaactacaagtggtataggaactggcagcagtgttgaaaaatacattattgatgaaagtgattacatgtcattcataaacaaccccagtcttactgtgactgtaccaattgctgtaggagaatctgactttgaaaatttaaacacggaagactttagtagtgaatcggatctggaagaaagcaaagagaaactgaatgaaagcagtagctcatcagaaggtagcactgtggacatcggcgcacctgtagaagaacagcccgtagtggaacctgaagaaactcttgaaccagaagcttgtttcactgaaggctgtgtacaaagattcaagtgttgtcaaatcaatgtggaagaaggcagaggaaaacaatggtggaacctgagaaggacgtgtttccgaatagttgaacataactggtttgagaccttcattgttttcatgattctccttagtagtggtgctctggcatttgaagatatatatattgatcagcgaaagacgattaagacgatgttggaatatgctgacaaggttttcacttacattttcattctggaaatgcttctaaaatgggtggcatatggctatcaaacatatttcaccaatgcctggtgttggctggacttcttaattgttgatgtttcattggtcagtttaacagcaaatgccttgggttactcagaacttggagccatcaaatctctcaggacactaagagctctgagacctctaagagccttatctcgatttgaagggatgagggtggttgtgaatgcccttttaggagcaattccatccatcatgaatgtgcttctggtttgtcttatattctggctaattttcagcatcatgggcgtaaatttgtttgctggcaaattctaccactgtattaacaccacaactggtgacaggtttgacatcgaagacgtgaataatcatactgattgcctaaaactaatagaaagaaatgagactgctcgatggaaaaatgtgaaagtaaactttgataatgtaggatttgggtatctctctttgcttcaagttgccacattcaaaggatggatggatataatgtatgcagcagttgattccagaaatgtggaactccagcctaagtatgaaaaaagtctgtacatgtatctttactttgttattttcatcatctttgggtccttcttcaccttgaacctgtttattggtgtcatcatagataatttcaaccagcagaaaaagaagtttggaggtcaagacatctttatgacagaagaacagaagaaatactataatgcaatgaaaaaattaggatcgaaaaaaccgcaaaagcctatacctcgaccaggaaacaaatttcaaggaatggtctttgacttcgtaaccagacaagtttttgacataagcatcatgattctcatctgtcttaacatggtcacaatgatggtggaaacagatgaccagagtgaatatgtgactaccattttgtcacgcatcaatctggtgttcattgtgctatttactggagagtgtgtactgaaactcatctctctacgccattattattttaccattggatggaatatttttgattttgtggttgtcattctctccattgtaggtatgtttcttgccgagctgatagaaaagtatttcgtgtcccctaccctgttccgagtgatccgtcttgctaggattggccgaatcctacgtctgatcaaaggagcaaaggggatccgcacgctgctctttgctttgatgatgtcccttcctgcgttgtttaacatcggcctcctactcttcctagtcatgttcatctacgccatctttgggatgtccaactttgcctatgttaagagggaagttgggatcgatgacatgttcaactttgagacctttggcaacagcatgatctgcctattccaaattacaacctctgctggctgggatggattgctagcacccattctcaacagtaagccacccgactgtgaccctaataaagttaaccctggaagctcagttaagggagactgtgggaacccatctgttggaattttcttttttgtcagttacatcatcatatccttcctggttgtggtgaacatgtacatcgcggtcatcctggagaacttcagtgttgctactgaagaaagtgcagagcctctgagtgaggatgactttgagatgttctatgaggtttgggagaagtttgatcccgatgcaactcagttcatggaatttgaaaaattatctcagtttgcagctgcgcttgaaccgcctctcaatctgccacaaccaaacaaactccagctcattgccatggatttgcccatggtgagtggtgaccggatccactgtcttgatatcttatttgcttttacaaagcgggttctaggagagagtggagagatggatgctctacgaatacagatggaagagcgattcatggcttccaatccttccaaggtctcctatcagccaatcactactactttaaaacgaaaacaagaggaagtatctgctgtcattattcagcgtgcttacagacgccaccttttaaagcgaactgtaaaacaagcttcctttacgtacaataaaaacaaaatcaaaggtggggctaatcttcttataaaagaagacatgataattgacagaataaatgaaaactctattacagaaaaaactgatctgaccatgtccactgcagcttgtccaccttcctatgaccgggtgacaaagccaattgtggaaaaacatgagcaagaaggcaaagatgaaaaagccaaagggaaataaatgaaaataaataaaaataattgggtgacaaattgtttacagcctgtgaaggtgatgtatttttatcaacaggactcctttaggaggtcaatgccaaactgactgtttttacacaaatctccttaaggtcagtgcctacaataagacagtgaccccttgtcagcaaactgtgactctgtgtaaaggggagatgaccttgacaggaggttactgttctcactaccagctgacactgctgaagataagatgcacaatggctagtcagactgtagggaccagtttcaaggggtgcaaacctgtgattttggggttgtttaacatgaaacactttagtgtagtaattgtatccactgtttgcatttcaactgccacatttgtcacatttttatggaatctgttagtggattcatctttttgttaatccatgtgtttattatatgtgactatttttgtaaacgaagtttctgttgagaaataggctaaggacctctataacaggtatgccacctggggggtatggcaaccacatggccctcccagctacacaaagtcgtggtttgcatgagggcatgctgcacttagagatcatgcatgagaaaaagtcacaagaaaaacaaattcttaaatttcaccatatttctgggaggggtaattgggtgataagtggaggtgctttgttgatcttgttttgcgaaatccagcccctagaccaagtagattatttgtgggtaggccagtaaatcttagcaggtgcaaacttcattcaaatgtttggagtcataaatgttatgtttctttttgttgtattaaaaaaaaaacctgaatagtgaatattgcccctcaccctccaccgccagaagactgaattgaccaaaattactctttataaatttctgctttttcctgcactttgtttagccatctttgggctctcagcaaggttgacactgtatatgttaatgaaatgctatttattatgtaaatagtcattttaccctgtggtgcacgtttgagcaaacaaataatgacctaagcacagtatttattgcatcaaatatgtaccacaagaaatgtagagtgcaagctttacacaggtaataaaatgtattctgtaccatttatagatagtttggatgctatcaatgcatgtttatattaccatgctgctgtatctggtttctctcactgctcagaatctcatttatgagaaaccatatgtcagtggtaaagtcaaggaaattgttcaacagatctcatttatttaagtcattaagcaatagtttgcagcactttaacagctttttggttatttttacattttaagtggataacatatggtatatagccagactgtacagacatgtttaaaaaaacacactgcttaacctattaaatatgtgtttagaattttataagcaaatataaatactgtaaaaagtcactttattttatttttcagcattatgtacataaatatgaagaggaaattatcttcaggttgatatcacaatcacttttcttactttctgtccatagtactttttcatgaaagaaatttgctaaataagacatgaaaacaagactgggtagttgtagatttctgctttttaaattacatttgctaattttagattatttcacaattttaaggagcaaaataggttcacgattcatatccaaattatgctttgcaattggaaaagggtttaaaattttatttatatttctggtagtacctgtactaactgaattgaaggtagtgcttatgttatttttgttctttttttctgacttcggtttatgttttcatttctttggagtaatgctgctctagattgttctaaatagaatgtgggcttcataatttttttttccacaaaaacagagtagtcaacttatatagtcaattacatcaggacattttgtgtttcttacagaagcaaaccataggctcctcttttccttaaaactacttagataaactgtattcgtgaactgcatgctggaaaatgctactattatgctaaataatgctaaccaacatttaaaatgtgcaaaactaataaagattacattttttatttt

SEQ ID NO: 50 - DNA, 8381 bp, Homo sapiens
atactgcagaggtctctggtgcatgtgtgtatgtgtgcgtttgtgtgtgtttgtgtgtctgtgtgttctgccccagtgagactgcagcccttgtaaatactttgacaccttttgcaagaaggaatctgaacaattgcaactgaaggcacattgttatcatctcgtctttgggtgatgctgttcctcactgcagatggataattttccttttaatcaggaatttcatatgcagaataaatggtaattaaaatgtgcaggatgacaagatggagcaaacagtgcttgtaccaccaggacctgacagcttcaacttcttcaccagagaatctcttgcggctattgaaagacgcattgcagaagaaaaggcaaagaatcccaaaccagacaaaaaagatgacgacgaaaatggcccaaagccaaatagtgacttggaagctggaaagaaccttccatttatttatggagacattcctccagagatggtgtcagagcccctggaggacctggacccctactatatcaataagaaaacttttatagtattgaataaattgaaggccatcttccggttcagtgccacctctgccctgtacattttaactcccttcaatcctcttaggaaaatagctattaagattttggtacattcattattcagcatgctaattatgtgcactattttgacaaactgtgtgtttatgacaatgagtaaccctcctgattggacaaagaatgtagaatacaccttcacaggaatatatacttttgaatcacttataaaaattattgcaaggggattctgtttagaagattttactttccttcgggatccatggaactggctcgatttcactgtcattacatttgcgtacgtcacagagtttgtggacctgggcaatgtctcggcattgagaacattcagagttctccgagcattgaagacgatttcagtcattccaggcctgaaaaccattgtgggagccctgatccagtctgtgaagaagctctcagatgtaatgatcctgactgtgttctgtctgagcgtatttgctctaattgggctgcagctgttcatgggcaacctgaggaataaatgtatacaatggcctcccaccaatgcttccttggaggaacatagtatagaaaagaatataactgtgaattataatggtacacttataaatgaaactgtctttgagtttgactggaagtcatatattcaagattcaagatatcattatttcctggagggttttttagatgcactactatgtggaaatagctctgatgcaggccaatgtccagagggatatatgtgtgtgaaagctggtagaaatcccaattatggctacacaagctttgataccttcagttgggcttttttgtccttgtttcgactaatgactcaggacttctgggaaaatctttatcaactgacattacgtgctgctgggaaaacgtacatgatattttttgtattggtcattttcttgggctcattctacctaataaatttgatcctggctgtggtggccatggcctacgaggaacagaatcaggccaccttggaagaagcagaacagaaagaggccgaatttcagcagatgattgaacagcttaaaaagcaacaggaggcagctcagcaggcagcaacggcaactgcctcagaacattccagagagcccagtgcagcaggcaggctctcagacagctcatctgaagcctctaagttgagttccaagagtgctaaggaaagaagaaatcggaggaagaaaagaaaacagaaagagcagtctggtggggaagagaaagatgaggatgaattccaaaaatctgaatctgaggacagcatcaggaggaaaggttttcgcttctccattgaagggaaccgattgacatatgaaaagaggtactcctccccacaccagtctttgttgagcatccgtggctccctattttcaccaaggcgaaatagcagaacaagccttttcagctttagagggcgagcaaaggatgtgggatctgagaacgacttcgcagatgatgagcacagcacctttgaggataacgagagccgtagagattccttgtttgtgccccgacgacacggagagagacgcaacagcaacctgagtcagaccagtaggtcatcccggatgctggcagtgtttccagcgaatgggaagatgcacagcactgtggattgcaatggtgtggtttccttggttggtggaccttcagttcctacatcgcctgttggacagcttctgccagaggtgataatagataagccagctactgatgacaatggaacaaccactgaaactgaaatgagaaagagaaggtcaagttctttccacgtttccatggactttctagaagatccttcccaaaggcaacgagcaatgagtatagccagcattctaacaaatacagtagaagaacttgaagaatccaggcagaaatgcccaccctgttggtataaattttccaacatattcttaatctgggactgttctccatattggttaaaagtgaaacatgttgtcaacctggttgtgatggacccatttgttgacctggccatcaccatctgtattgtcttaaatactcttttcatggccatggagcactatccaatgacggaccatttcaataatgtgcttacagtaggaaacttggttttcactgggatctttacagcagaaatgtttctgaaaattattgccatggatccttactattatttccaagaaggctggaatatctttgacggttttattgtgacgcttagcctggtagaacttggactcgccaatgtggaaggattatctgttctccgttcatttcgattgctgcgagttttcaagttggcaaaatcttggccaacgttaaatatgctaataaagatcatcggcaattccgtgggggctctgggaaatttaaccctcgtcttggccatcatcgtcttcatttttgccgtggtcggcatgcagctctttggtaaaagctacaaagattgtgtctgcaagatcgccagtgattgtcaactcccacgctggcacatgaatgacttcttccactccttcctgattgtgttccgcgtgctgtgtggggagtggatagagaccatgtgggactgtatggaggttgctggtcaagccatgtgccttactgtcttcatgatggtcatggtgattggaaacctagtggtcctgaatctctttctggccttgcttctgagctcatttagtgcagacaaccttgcagccactgatgatgataatgaaatgaataatctccaaattgctgtggataggatgcacaaaggagtagcttatgtgaaaagaaaaatatatgaatttattcaacagtccttcattaggaaacaaaagattttagatgaaattaaaccacttgatgatctaaacaacaagaaagacagttgtatgtccaatcatacaacagaaattgggaaagatcttgactatcttaaagatgtaaatggaactacaagtggtataggaactggcagcagtgttgaaaaatacattattgatgaaagtgattacatgtcattcataaacaaccccagtcttactgtgactgtaccaattgctgtaggagaatctgactttgaaaatttaaacacggaagactttagtagtgaatcggatctggaagaaagcaaagagaaactgaatgaaagcagtagctcatcagaaggtagcactgtggacatcggcgcacctgtagaagaacagcccgtagtggaacctgaagaaactcttgaaccagaagcttgtttcactgaaggctgtgtacaaagattcaagtgttgtcaaatcaatgtggaagaaggcagaggaaaacaatggtggaacctgagaaggacgtgtttccgaatagttgaacataactggtttgagaccttcattgttttcatgattctccttagtagtggtgctctggcatttgaagatatatatattgatcagcgaaagacgattaagacgatgttggaatatgctgacaaggttttcacttacattttcattctggaaatgcttctaaaatgggtggcatatggctatcaaacatatttcaccaatgcctggtgttggctggacttcttaattgttgatgtttcattggtcagtttaacagcaaatgccttgggttactcagaacttggagccatcaaatctctcaggacactaagagctctgagacctctaagagccttatctcgatttgaagggatgagggtggttgtgaatgcccttttaggagcaattccatccatcatgaatgtgcttctggtttgtcttatattctggctaattttcagcatcatgggcgtaaatttgtttgctggcaaattctaccactgtattaacaccacaactggtgacaggtttgacatcgaagacgtgaataatcatactgattgcctaaaactaatagaaagaaatgagactgctcgatggaaaaatgtgaaagtaaactttgataatgtaggatttgggtatctctctttgcttcaagttgccacattcaaaggatggatggatataatgtatgcagcagttgattccagaaatgtggaactccagcctaagtatgaaaaaagtctgtacatgtatctttactttgttattttcatcatctttgggtccttcttcaccttgaacctgtttattgttgtcatcatagataatttcaaccagcagaaaaagaagtttggaggtcaagacatctttatgacagaagaacagaagaaatactataatgcaatgaaaaaattaggatcgaaaaaaccgcaaaagcctatacctcgaccaggaaacaaatttcaaggaatggtctttgacttcgtaaccagacaagtttttgacataagcatcatgattctcatctgtcttaacatggtcacaatgatggtggaaacagatgaccagagtgaatatgtgactaccattttgtcacgcatcaatctggtgttcattgtgctatttactggagagtgtgtactgaaactcatctctctacgccattattattttaccattggatggaatatttttgattttgtggttgtcattctctccattgtaggtatgtttcttgccgagctgatagaaaagtatttcgtgtcccctaccctgttccgagtgatccgtcttgctaggattggccgaatcctacgtctgatcaaaggagcaaaggggatccgcacgctgctctttgctttgatgatgtcccttcctgcgttgtttaacatcggcctcctactcttcctagtcatgttcatctacgccatctttgggatgtccaactttgcctatgttaagagggaagttgggatcgatgacatgttcaactttgagacctttggcaacagcatgatctgcctattccaaattacaacctctgctggctgggatggattgctagcacccattctcaacagtaagccacccgactgtgaccctaataaagttaaccctggaagctcagttaagggagactgtgggaacccatctgttggaattttcttttttgtcagttacatcatcatatccttcctggttgtggtgaacatgtacatcgcggtcatcctggagaacttcagtgttgctactgaagaaagtgcagagcctctgagtgaggatgactttgagatgttctatgaggtttgggagaagtttgatcccgatgcaactcagttcatggaatttgaaaaattatctcagtttgcagctgcgcttgaaccgcctctcaatctgccacaaccaaacaaactccagctcattgccatggatttgcccatggtgagtggtgaccggatccactgtcttgatatcttatttgcttttacaaagcgggttctaggagagagtggagagatggatgctctacgaatacagatggaagagcgattcatggcttccaatccttccaaggtctcctatcagccaatcactactactttaaaacgaaaacaagaggaagtatctgctgtcattattcagcgtgcttacagacgccaccttttaaagcgaactgtaaaacaagcttcctttacgtacaataaaaacaaaatcaaaggtggggctaatcttcttataaaagaagacatgataattgacagaataaatgaaaactctattacagaaaaaactgatctgaccatgtccactgcagcttgtccaccttcctatgaccgggtgacaaagccaattgtggaaaaacatgagcaagaaggcaaagatgaaaaagccaaagggaaataaatgaaaataaataaaaataattgggtgacaaattgtttacagcctgtgaaggtgatgtatttttatcaacaggactcctttaggaggtcaatgccaaactgactgtttttacacaaatctccttaaggtcagtgcctacaataagacagtgaccccttgtcagcaaactgtgactctgtgtaaaggggagatgaccttgacaggaggttactgttctcactaccagctgacactgctgaagataagatgcacaatggctagtcagactgtagggaccagtttcaaggggtgcaaacctgtgattttggggttgtttaacatgaaacactttagtgtagtaattgtatccactgtttgcatttcaactgccacatttgtcacatttttatggaatctgttagtggattcatctttttgttaatccatgtgtttattatatgtgactatttttgtaaacgaagtttctgttgagaaataggctaaggacctctataacaggtatgccacctggggggtatggcaaccacatggccctcccagctacacaaagtcgtggtttgcatgagggcatgctgcacttagagatcatgcatgagaaaaagtcacaagaaaaacaaattcttaaatttcaccatatttctgggaggggtaattgggtgataagtggaggtgctttgttgatcttgttttgcgaaatccagcccctagaccaagtagattatttgtgggtaggccagtaaatcttagcaggtgcaaacttcattcaaatgtttggagtcataaatgttatgtttctttttgttgtattaaaaaaaaaacctgaatagtgaatattgcccctcaccctccaccgccagaagactgaattgaccaaaattactctttataaatttctgctttttcctgcactttgtttagccatctttgggctctcagcaaggttgacactgtatatgttaatgaaatgctatttattatgtaaatagtcattttaccctgtggtgcacgtttgagcaaacaaataatgacctaagcacagtatttattgcatcaaatatgtaccacaagaaatgtagagtgcaagctttacacaggtaataaaatgtattctgtaccatttatagatagtttggatgctatcaatgcatgtttatattaccatgctgctgtatctggtttctctcactgctcagaatctcatttatgagaaaccatatgtcagtggtaaagtcaaggaaattgttcaacagatctcatttatttaagtcattaagcaatagtttgcagcactttaacagctttttggttatttttacattttaagtggataacatatggtatatagccagactgtacagacatgtttaaaaaaacacactgcttaacctattaaatatgtgtttagaattttataagcaaatataaatactgtaaaaagtcactttattttatttttcagcattatgtacataaatatgaagaggaaattatcttcaggttgatatcacaatcacttttcttactttctgtccatagtactttttcatgaaagaaatttgctaaataagacatgaaaacaagactgggtagttgtagatttctgctttttaaattacatttgctaattttagattatttcacaattttaaggagcaaaataggttcacgattcatatccaaattatgctttgcaattggaaaagggtttaaaattttatttatatttctggtagtacctgtactaactgaattgaaggtagtgcttatgttatttttgttctttttttctgacttcggtttatgttttcatttctttggagtaatgctgctctagattgttctaaatagaatgtgggcttcataatttttttttccacaaaaacagagtagtcaacttatatagtcaattacatcaggacattttgtgtttcttacagaagcaaaccataggctcctcttttccttaaaactacttagataaactgtattcgtgaactgcatgctggaaaatgctactattatgctaaataatgctaaccaacatttaaaatgtgcaaaactaataaagattacattttttatttt

SEQ ID NO: 51 - DNA, 8381 bp, Homo sapiens
atactgcagaggtctctggtgcatgtgtgtatgtgtgcgtttgtgtgtgtttgtgtgtctgtgtgttctgccccagtgagactgcagcccttgtaaatactttgacaccttttgcaagaaggaatctgaacaattgcaactgaaggcacattgttatcatctcgtctttgggtgatgctgttcctcactgcagatggataattttccttttaatcaggaatttcatatgcagaataaatggtaattaaaatgtgcaggatgacaagatggagcaaacagtgcttgtaccaccaggacctgacagcttcaacttcttcaccagagaatctcttgcggctattgaaagacgcattgcagaagaaaaggcaaagaatcccaaaccagacaaaaaagatgacgacgaaaatggcccaaagccaaatagtgacttggaagctggaaagaaccttccatttatttatggagacattcctccagagatggtgtcagagcccctggaggacctggacccctactatatcaataagaaaacttttatagtattgaataaattgaaggccatcttccggttcagtgccacctctgccctgtacattttaactcccttcaatcctcttaggaaaatagctattaagattttggtacattcattattcagcatgctaattatgtgcactattttgacaaactgtgtgtttatgacaatgagtaaccctcctgattggacaaagaatgtagaatacaccttcacaggaatatatacttttgaatcacttataaaaattattgcaaggggattctgtttagaagattttactttccttcgggatccatggaactggctcgatttcactgtcattacatttgcgtacgtcacagagtttgtggacctgggcaatgtctcggcattgagaacattcagagttctccgagcattgaagacgatttcagtcattccaggcctgaaaaccattgtgggagccctgatccagtctgtgaagaagctctcagatgtaatgatcctgactgtgttctgtctgagcgtatttgctctaattgggctgcagctgttcatgggcaacctgaggaataaatgtatacaatggcctcccaccaatgcttccttggaggaacatagtatagaaaagaatataactgtgaattataatggtacacttataaatgaaactgtctttgagtttgactggaagtcatatattcaagattcaagatatcattatttcctggagggttttttagatgcactactatgtggaaatagctctgatgcaggccaatgtccagagggatatatgtgtgtgaaagctggtagaaatcccaattatggctacacaagctttgataccttcagttgggcttttttgtccttgtttcgactaatgactcaggacttctgggaaaatctttatcaactgacattacgtgctgctgggaaaacgtacatgatattttttgtattggtcattttcttgggctcattctacctaataaatttgatcctggctgtggtggccatggcctacgaggaacagaatcaggccaccttggaagaagcagaacagaaagaggccgaatttcagcagatgattgaacagcttaaaaagcaacaggaggcagctcagcaggcagcaacggcaactgcctcagaacattccagagagcccagtgcagcaggcaggctctcagacagctcatctgaagcctctaagttgagttccaagagtgctaaggaaagaagaaatcggaggaagaaaagaaaacagaaagagcagtctggtggggaagagaaagatgaggatgaattccaaaaatctgaatctgaggacagcatcaggaggaaaggttttcgcttctccattgaagggaaccgattgacatatgaaaagaggtactcctccccacaccagtctttgttgagcatccgtggctccctattttcaccaaggcgaaatagcagaacaagccttttcagctttagagggcgagcaaaggatgtgggatctgagaacgacttcgcagatgatgagcacagcacctttgaggataacgagagccgtagagattccttgtttgtgccccgacgacacggagagagacgcaacagcaacctgagtcagaccagtaggtcatcccggatgctggcagtgtttccagcgaatgggaagatgcacagcactgtggattgcaatggtgtggtttccttggttggtggaccttcagttcctacatcgcctgttggacagcttctgccagaggtgataatagataagccagctactgatgacaatggaacaaccactgaaactgaaatgagaaagagaaggtcaagttctttccacgtttccatggactttctagaagatccttcccaaaggcaacgagcaatgagtatagccagcattctaacaaatacagtagaagaacttgaagaatccaggcagaaatgcccaccctgttggtataaattttccaacatattcttaatctgggactgttctccatattggttaaaagtgaaacatgttgtcaacctggttgtgatggacccatttgttgacctggccatcaccatctgtattgtcttaaatactcttttcatggccatggagcactatccaatgacggaccatttcaataatgtgcttacagtaggaaacttggttttcactgggatctttacagcagaaatgtttctgaaaattattgccatggatccttactattatttccaagaaggctggaatatctttgacggttttattgtgacgcttagcctggtagaacttggactcgccaatgtggaaggattatctgttctccgttcatttcgattgctgcgagttttcaagttggcaaaatcttggccaacgttaaatatgctaataaagatcatcggcaattccgtgggggctctgggaaatttaaccctcgtcttggccatcatcgtcttcatttttgccgtggtcggcatgcagctctttggtaaaagctacaaagattgtgtctgcaagatcgccagtgattgtcaactcccacgctggcacatgaatgacttcttccactccttcctgattgtgttccgcgtgctgtgtggggagtggatagagaccatgtgggactgtatggaggttgctggtcaagccatgtgccttactgtcttcatgatggtcatggtgattggaaacctagtggtcctgaatctctttctggccttgcttctgagctcatttagtgcagacaaccttgcagccactgatgatgataatgaaatgaataatctccaaattgctgtggataggatgcacaaaggagtagcttatgtgaaaagaaaaatatatgaatttattcaacagtccttcattaggaaacaaaagattttagatgaaattaaaccacttgatgatctaaacaacaagaaagacagttgtatgtccaatcatacaacagaaattgggaaagatcttgactatcttaaagatgtaaatggaactacaagtggtataggaactggcagcagtgttgaaaaatacattattgatgaaagtgattacatgtcattcataaacaaccccagtcttactgtgactgtaccaattgctgtaggagaatctgactttgaaaatttaaacacggaagactttagtagtgaatcggatctggaagaaagcaaagagaaactgaatgaaagcagtagctcatcagaaggtagcactgtggacatcggcgcacctgtagaagaacagcccgtagtggaacctgaagaaactcttgaaccagaagcttgtttcactgaaggctgtgtacaaagattcaagtgttgtcaaatcaatgtggaagaaggcagaggaaaacaatggtggaacctgagaaggacgtgtttccgaatagttgaacataactggtttgagaccttcattgttttcatgattctccttagtagtggtgctctggcatttgaagatatatatattgatcagcgaaagacgattaagacgatgttggaatatgctgacaaggttttcacttacattttcattctggaaatgcttctaaaatgggtggcatatggctatcaaacatatttcaccaatgcctggtgttggctggacttcttaattgttgatgtttcattggtcagtttaacagcaaatgccttgggttactcagaacttggagccatcaaatctctcaggacactaagagctctgagacctctaagagccttatctcgatttgaagggatgagggtggttgtgaatgcccttttaggagcaattccatccatcatgaatgtgcttctggtttgtcttatattctggctaattttcagcatcatgggcgtaaatttgtttgctggcaaattctaccactgtattaacaccacaactggtgacaggtttgacatcgaagacgtgaataatcatactgattgcctaaaactaatagaaagaaatgagactgctcgatggaaaaatgtgaaagtaaactttgataatgtaggatttgggtatctctctttgcttcaagttgccacattcaaaggatggatggatataatgtatgcagcagttgattccagaaatgtggaactccagcctaagtatgaaaaaagtctgtacatgtatctttactttgttattttcatcatctttgggtccttcttcaccttgaacctgtttattggtgtcatcatagataatttcaaccagcagaaaaagaagtttggaggtcaagacatctttatgacagaagaacagaagaaatactataatgcaatgaaaaaattaggatcgaaaaaaccgcaaaagcctatacctcgaccaggaaacaaatttcaaggaatggtctttgacttcgtaaccagacaagtttttgacataagcatcatgattctcatctgtcttaacatggtcacaatgatggtggaaacagatgaccagagtgaatatgtgactaccattttgtcacgcatcaatctggtgttcattgtgctatttactggagagtgtgtactgaaactcatctctctacgccattattattttaccattggatggaatatttttgattttgtggttgtcattctctccattgtaggtatgtttcttgccgagctgatagaaaagtatttcgtgtcccctaccctgttccaagtgatccgtcttgctaggattggccgaatcctacgtctgatcaaaggagcaaaggggatccgcacgctgctctttgctttgatgatgtcccttcctgcgttgtttaacatcggcctcctactcttcctagtcatgttcatctacgccatctttgggatgtccaactttgcctatgttaagagggaagttgggatcgatgacatgttcaactttgagacctttggcaacagcatgatctgcctattccaaattacaacctctgctggctgggatggattgctagcacccattctcaacagtaagccacccgactgtgaccctaataaagttaaccctggaagctcagttaagggagactgtgggaacccatctgttggaattttcttttttgtcagttacatcatcatatccttcctggttgtggtgaacatgtacatcgcggtcatcctggagaacttcagtgttgctactgaagaaagtgcagagcctctgagtgaggatgactttgagatgttctatgaggtttgggagaagtttgatcccgatgcaactcagttcatggaatttgaaaaattatctcagtttgcagctgcgcttgaaccgcctctcaatctgccacaaccaaacaaactccagctcattgccatggatttgcccatggtgagtggtgaccggatccactgtcttgatatcttatttgcttttacaaagcgggttctaggagagagtggagagatggatgctctacgaatacagatggaagagcgattcatggcttccaatccttccaaggtctcctatcagccaatcactactactttaaaacgaaaacaagaggaagtatctgctgtcattattcagcgtgcttacagacgccaccttttaaagcgaactgtaaaacaagcttcctttacgtacaataaaaacaaaatcaaaggtggggctaatcttcttataaaagaagacatgataattgacagaataaatgaaaactctattacagaaaaaactgatctgaccatgtccactgcagcttgtccaccttcctatgaccgggtgacaaagccaattgtggaaaaacatgagcaagaaggcaaagatgaaaaagccaaagggaaataaatgaaaataaataaaaataattgggtgacaaattgtttacagcctgtgaaggtgatgtatttttatcaacaggactcctttaggaggtcaatgccaaactgactgtttttacacaaatctccttaaggtcagtgcctacaataagacagtgaccccttgtcagcaaactgtgactctgtgtaaaggggagatgaccttgacaggaggttactgttctcactaccagctgacactgctgaagataagatgcacaatggctagtcagactgtagggaccagtttcaaggggtgcaaacctgtgattttggggttgtttaacatgaaacactttagtgtagtaattgtatccactgtttgcatttcaactgccacatttgtcacatttttatggaatctgttagtggattcatctttttgttaatccatgtgtttattatatgtgactatttttgtaaacgaagtttctgttgagaaataggctaaggacctctataacaggtatgccacctggggggtatggcaaccacatggccctcccagctacacaaagtcgtggtttgcatgagggcatgctgcacttagagatcatgcatgagaaaaagtcacaagaaaaacaaattcttaaatttcaccatatttctgggaggggtaattgggtgataagtggaggtgctttgttgatcttgttttgcgaaatccagcccctagaccaagtagattatttgtgggtaggccagtaaatcttagcaggtgcaaacttcattcaaatgtttggagtcataaatgttatgtttctttttgttgtattaaaaaaaaaacctgaatagtgaatattgcccctcaccctccaccgccagaagactgaattgaccaaaattactctttataaatttctgctttttcctgcactttgtttagccatctttgggctctcagcaaggttgacactgtatatgttaatgaaatgctatttattatgtaaatagtcattttaccctgtggtgcacgtttgagcaaacaaataatgacctaagcacagtatttattgcatcaaatatgtaccacaagaaatgtagagtgcaagctttacacaggtaataaaatgtattctgtaccatttatagatagtttggatgctatcaatgcatgtttatattaccatgctgctgtatctggtttctctcactgctcagaatctcatttatgagaaaccatatgtcagtggtaaagtcaaggaaattgttcaacagatctcatttatttaagtcattaagcaatagtttgcagcactttaacagctttttggttatttttacattttaagtggataacatatggtatatagccagactgtacagacatgtttaaaaaaacacactgcttaacctattaaatatgtgtttagaattttataagcaaatataaatactgtaaaaagtcactttattttatttttcagcattatgtacataaatatgaagaggaaattatcttcaggttgatatcacaatcacttttcttactttctgtccatagtactttttcatgaaagaaatttgctaaataagacatgaaaacaagactgggtagttgtagatttctgctttttaaattacatttgctaattttagattatttcacaattttaaggagcaaaataggttcacgattcatatccaaattatgctttgcaattggaaaagggtttaaaattttatttatatttctggtagtacctgtactaactgaattgaaggtagtgcttatgttatttttgttctttttttctgacttcggtttatgttttcatttctttggagtaatgctgctctagattgttctaaatagaatgtgggcttcataatttttttttccacaaaaacagagtagtcaacttatatagtcaattacatcaggacattttgtgtttcttacagaagcaaaccataggctcctcttttccttaaaactacttagataaactgtattcgtgaactgcatgctggaaaatgctactattatgctaaataatgctaaccaacatttaaaatgtgcaaaactaataaagattacattttttatttt

SEQ ID NO: 52 - DNA, 8380 bp, Homo sapiens
atactgcagaggtctctggtgcatgtgtgtatgtgtgcgtttgtgtgtgtttgtgtgtctgtgtgttctgccccagtgagactgcagcccttgtaaatactttgacaccttttgcaagaaggaatctgaacaattgcaactgaaggcacattgttatcatctcgtctttgggtgatgctgttcctcactgcagatggataattttccttttaatcaggaatttcatatgcagaataaatggtaattaaaatgtgcaggatgacaagatggagcaaacagtgcttgtaccaccaggacctgacagcttcaacttcttcaccagagaatctcttgcggctattgaaagacgcattgcagaagaaaaggcaaagaatcccaaaccagacaaaaaagatgacgacgaaaatggcccaaagccaaatagtgacttggaagctggaaagaaccttccatttatttatggagacattcctccagagatggtgtcagagcccctggaggacctggacccctactatatcaataagaaaacttttatagtattgaataaattgaaggccatcttccggttcagtgccacctctgccctgtacattttaactcccttcaatcctcttaggaaaatagctattaagattttggtacattcattattcagcatgctaattatgtgcactattttgacaaactgtgtgtttatgacaatgagtaaccctcctgattggacaaagaatgtagaatacaccttcacaggaatatatacttttgaatcacttataaaaattattgcaaggggattctgtttagaagattttactttccttcgggatccatggaactggctcgatttcactgtcattacatttgcgtacgtcacagagtttgtggacctgggcaatgtctcggcattgagaacattcagagttctccgagcattgaagacgatttcagtcattccaggcctgaaaaccattgtgggagccctgatccagtctgtgaagaagctctcagatgtaatgatcctgactgtgttctgtctgagcgtatttgctctaattgggctgcagctgttcatgggcaacctgaggaataaatgtatacaatggcctcccaccaatgcttccttggaggaacatagtatagaaaagaatataactgtgaattataatggtacacttataaatgaaactgtctttgagtttgactggaagtcatatattcaagattcaagatatcattatttcctggagggttttttagatgcactactatgtggaaatagctctgatgcaggccaatgtccagagggatatatgtgtgtgaaagctggtagaaatcccaattatggctacacaagctttgataccttcagttgggcttttttgtccttgtttcgactaatgactcaggacttctgggaaaatctttatcaactgacattacgtgctgctgggaaaacgtacatgatattttttgtattggtcattttcttgggctcattctacctaataaatttgatcctggctgtggtggccatggcctacgaggaacagaatcaggccaccttggaagaagcagaacagaaagaggccgaatttcagcagatgattgaacagcttaaaaagcaacaggaggcagctcagcaggcagcaacggcaactgcctcagaacattccagagagcccagtgcagcaggcaggctctcagacagctcatctgaagcctctaagttgagttccaagagtgctaaggaaagaagaaatcggaggaagaaaagaaaacagaaagagcagtctggtggggaagagaaagatgaggatgaattccaaaaatctgaatctgaggacagcatcaggaggaaaggttttcgcttctccattgaagggaaccgattgacatatgaaaagaggtactcctccccacaccagtctttgttgagcatccgtggctccctattttcaccaaggcgaaatagcagaacaagcctttcagctttagagggcgagcaaaggatgtgggatctgagaacgacttcgcagatgatgagcacagcacctttgaggataacgagagccgtagagattccttgtttgtgccccgacgacacggagagagacgcaacagcaacctgagtcagaccagtaggtcatcccggatgctggcagtgtttccagcgaatgggaagatgcacagcactgtggattgcaatggtgtggtttccttggttggtggaccttcagttcctacatcgcctgttggacagcttctgccagaggtgataatagataagccagctactgatgacaatggaacaaccactgaaactgaaatgagaaagagaaggtcaagttctttccacgtttccatggactttctagaagatccttcccaaaggcaacgagcaatgagtatagccagcattctaacaaatacagtagaagaacttgaagaatccaggcagaaatgcccaccctgttggtataaattttccaacatattcttaatctgggactgttctccatattggttaaaagtgaaacatgttgtcaacctggttgtgatggacccatttgttgacctggccatcaccatctgtattgtcttaaatactcttttcatggccatggagcactatccaatgacggaccatttcaataatgtgcttacagtaggaaacttggttttcactgggatctttacagcagaaatgtttctgaaaattattgccatggatccttactattatttccaagaaggctggaatatctttgacggttttattgtgacgcttagcctggtagaacttggactcgccaatgtggaaggattatctgttctccgttcatttcgattgctgcgagttttcaagttggcaaaatcttggccaacgttaaatatgctaataaagatcatcggcaattccgtgggggctctgggaaatttaaccctcgtcttggccatcatcgtcttcatttttgccgtggtcggcatgcagctctttggtaaaagctacaaagattgtgtctgcaagatcgccagtgattgtcaactcccacgctggcacatgaatgacttcttccactccttcctgattgtgttccgcgtgctgtgtggggagtggatagagaccatgtgggactgtatggaggttgctggtcaagccatgtgccttactgtcttcatgatggtcatggtgattggaaacctagtggtcctgaatctctttctggccttgcttctgagctcatttagtgcagacaaccttgcagccactgatgatgataatgaaatgaataatctccaaattgctgtggataggatgcacaaaggagtagcttatgtgaaaagaaaaatatatgaatttattcaacagtccttcattaggaaacaaaagattttagatgaaattaaaccacttgatgatctaaacaacaagaaagacagttgtatgtccaatcatacaacagaaattgggaaagatcttgactatcttaaagatgtaaatggaactacaagtggtataggaactggcagcagtgttgaaaaatacattattgatgaaagtgattacatgtcattcataaacaaccccagtcttactgtgactgtaccaattgctgtaggagaatctgactttgaaaatttaaacacggaagactttagtagtgaatcggatctggaagaaagcaaagagaaactgaatgaaagcagtagctcatcagaaggtagcactgtggacatcggcgcacctgtagaagaacagcccgtagtggaacctgaagaaactcttgaaccagaagcttgtttcactgaaggctgtgtacaaagattcaagtgttgtcaaatcaatgtggaagaaggcagaggaaaacaatggtggaacctgagaaggacgtgtttccgaatagttgaacataactggtttgagaccttcattgttttcatgattctccttagtagtggtgctctggcatttgaagatatatatattgatcagcgaaagacgattaagacgatgttggaatatgctgacaaggttttcacttacattttcattctggaaatgcttctaaaatgggtggcatatggctatcaaacatatttcaccaatgcctggtgttggctggacttcttaattgttgatgtttcattggtcagtttaacagcaaatgccttgggttactcagaacttggagccatcaaatctctcaggacactaagagctctgagacctctaagagccttatctcgatttgaagggatgagggtggttgtgaatgcccttttaggagcaattccatccatcatgaatgtgcttctggtttgtcttatattctggctaattttcagcatcatgggcgtaaatttgtttgctggcaaattctaccactgtattaacaccacaactggtgacaggtttgacatcgaagacgtgaataatcatactgattgcctaaaactaatagaaagaaatgagactgctcgatggaaaaatgtgaaagtaaactttgataatgtaggatttgggtatctctctttgcttcaagttgccacattcaaaggatggatggatataatgtatgcagcagttgattccagaaatgtggaactccagcctaagtatgaaaaaagtctgtacatgtatctttactttgttattttcatcatctttgggtccttcttcaccttgaacctgtttattggtgtcatcatagataatttcaaccagcagaaaaagaagtttggaggtcaagacatctttatgacagaagaacagaagaaatactataatgcaatgaaaaaattaggatcgaaaaaaccgcaaaagcctatacctcgaccaggaaacaaatttcaaggaatggtctttgacttcgtaaccagacaagtttttgacataagcatcatgattctcatctgtcttaacatggtcacaatgatggtggaaacagatgaccagagtgaatatgtgactaccattttgtcacgcatcaatctggtgttcattgtgctatttactggagagtgtgtactgaaactcatctctctacgccattattattttaccattggatggaatatttttgattttgtggttgtcattctctccattgtaggtatgtttcttgccgagctgatagaaaagtatttcgtgtcccctaccctgttccgagtgatccgtcttgctaggattggccgaatcctacgtctgatcaaaggagcaaaggggatccgcacgctgctctttgctttgatgatgtcccttcctgcgttgtttaacatcggcctcctactcttcctagtcatgttcatctacgccatctttgggatgtccaactttgcctatgttaagagggaagttgggatcgatgacatgttcaactttgagacctttggcaacagcatgatctgcctattccaaattacaacctctgctggctgggatggattgctagcacccattctcaacagtaagccacccgactgtgaccctaataaagttaaccctggaagctcagttaagggagactgtgggaacccatctgttggaattttcttttttgtcagttacatcatcatatccttcctggttgtggtgaacatgtacatcgcggtcatcctggagaacttcagtgttgctactgaagaaagtgcagagcctctgagtgaggatgactttgagatgttctatgaggtttgggagaagtttgatcccgatgcaactcagttcatggaatttgaaaaattatctcagtttgcagctgcgcttgaaccgcctctcaatctgccacaaccaaacaaactccagctcattgccatggatttgcccatggtgagtggtgaccggatccactgtcttgatatcttatttgcttttacaaagcgggttctaggagagagtggagagatggatgctctacgaatacagatggaagagcgattcatggcttccaatccttccaaggtctcctatcagccaatcactactactttaaaacgaaaacaagaggaagtatctgctgtcattattcagcgtgcttacagacgccaccttttaaagcgaactgtaaaacaagcttcctttacgtacaataaaaacaaaatcaaaggtggggctaatcttcttataaaagaagacatgataattgacagaataaatgaaaactctattacagaaaaaactgatctgaccatgtccactgcagcttgtccaccttcctatgaccgggtgacaaagccaattgtggaaaaacatgagcaagaaggcaaagatgaaaaagccaaagggaaataaatgaaaataaataaaaataattgggtgacaaattgtttacagcctgtgaaggtgatgtatttttatcaacaggactcctttaggaggtcaatgccaaactgactgtttttacacaaatctccttaaggtcagtgcctacaataagacagtgaccccttgtcagcaaactgtgactctgtgtaaaggggagatgaccttgacaggaggttactgttctcactaccagctgacactgctgaagataagatgcacaatggctagtcagactgtagggaccagtttcaaggggtgcaaacctgtgattttggggttgtttaacatgaaacactttagtgtagtaattgtatccactgtttgcatttcaactgccacatttgtcacatttttatggaatctgttagtggattcatctttttgttaatccatgtgtttattatatgtgactatttttgtaaacgaagtttctgttgagaaataggctaaggacctctataacaggtatgccacctggggggtatggcaaccacatggccctcccagctacacaaagtcgtggtttgcatgagggcatgctgcacttagagatcatgcatgagaaaaagtcacaagaaaaacaaattcttaaatttcaccatatttctgggaggggtaattgggtgataagtggaggtgctttgttgatcttgttttgcgaaatccagcccctagaccaagtagattatttgtgggtaggccagtaaatcttagcaggtgcaaacttcattcaaatgtttggagtcataaatgttatgtttctttttgttgtattaaaaaaaaaacctgaatagtgaatattgcccctcaccctccaccgccagaagactgaattgaccaaaattactctttataaatttctgctttttcctgcactttgtttagccatctttgggctctcagcaaggttgacactgtatatgttaatgaaatgctatttattatgtaaatagtcattttaccctgtggtgcacgtttgagcaaacaaataatgacctaagcacagtatttattgcatcaaatatgtaccacaagaaatgtagagtgcaagctttacacaggtaataaaatgtattctgtaccatttatagatagtttggatgctatcaatgcatgtttatattaccatgctgctgtatctggtttctctcactgctcagaatctcatttatgagaaaccatatgtcagtggtaaagtcaaggaaattgttcaacagatctcatttatttaagtcattaagcaatagtttgcagcactttaacagctttttggttatttttacattttaagtggataacatatggtatatagccagactgtacagacatgtttaaaaaaacacactgcttaacctattaaatatgtgtttagaattttataagcaaatataaatactgtaaaaagtcactttattttatttttcagcattatgtacataaatatgaagaggaaattatcttcaggttgatatcacaatcacttttcttactttctgtccatagtactttttcatgaaagaaatttgctaaataagacatgaaaacaagactgggtagttgtagatttctgctttttaaattacatttgctaattttagattatttcacaattttaaggagcaaaataggttcacgattcatatccaaattatgctttgcaattggaaaagggtttaaaattttatttatatttctggtagtacctgtactaactgaattgaaggtagtgcttatgttatttttgttctttttttctgacttcggtttatgttttcatttctttggagtaatgctgctctagattgttctaaatagaatgtgggcttcataatttttttttccacaaaaacagagtagtcaacttatatagtcaattacatcaggacattttgtgtttcttacagaagcaaaccataggctcctcttttccttaaaactacttagataaactgtattcgtgaactgcatgctggaaaatgctactattatgctaaataatgctaaccaacatttaaaatgtgcaaaactaataaagattacattttttatttt

SEQ ID NO: 53 - DNA, 8379 bp, Homo sapiens
atactgcagaggtctctggtgcatgtgtgtatgtgtgcgtttgtgtgtgtttgtgtgtctgtgtgttctgccccagtgagactgcagcccttgtaaatactttgacaccttttgcaagaaggaatctgaacaattgcaactgaaggcacattgttatcatctcgtctttgggtgatgctgttcctcactgcagatggataattttccttttaatcaggaatttcatatgcagaataaatggtaattaaaatgtgcaggatgacaagatggagcaaacagtgcttgtaccaccaggacctgacagcttcaacttcttcaccagagaatctcttgcggctattgaaagacgcattgcagaagaaaaggcaaagaatcccaaaccagacaaaaaagatgacgacgaaaatggcccaaagccaaatagtgacttggaagctggaaagaaccttccatttatttatggagacattcctccagagatggtgtcagagcccctggaggacctggacccctactatatcaataagaaaacttttatagtattgaataaattgaaggccatcttccggttcagtgccacctctgccctgtacattttaactcccttcaatcctcttaggaaaatagctattaagattttggtacattcattattcagcatgctaattatgtgcactattttgacaaactgtgtgtttatgacaatgagtaaccctcctgattggacaaagaatgtagaatacaccttcacaggaatatatacttttgaatcacttataaaaattattgcaaggggattctgtttagaagattttactttccttcgggatccatggaactggctcgatttcactgtcattacatttgcgtacgtcacagagtttgtggacctgggcaatgtctcggcattgagaacattcagagttctccgagcattgaagacgatttcagtcattccaggcctgaaaaccattgtgggagccctgatccagtctgtgaagaagctctcagatgtaatgatcctgactgtgttctgtctgagcgtatttgctctaattgggctgcagctgttcatgggcaacctgaggaataaatgtatacaatggcctcccaccaatgcttccttggaggaacatagtatagaaaagaatataactgtgaattataatggtacacttataaatgaaactgtctttgagtttgactggaagtcatatattcaagattcaagatatcattatttcctggagggttttttagatgcactactatgtggaaatagctctgatgcaggccaatgtccagagggatatatgtgtgtgaaagctggtagaaatcccaattatggctacacaagctttgataccttcagttgggcttttttgtccttgtttcgactaatgactcaggacttctgggaaaatctttatcaactgacattacgtgctgctgggaaaacgtacatgatattttttgtattggtcattttcttgggctcattctacctaataaatttgatcctggctgtggtggccatggcctacgaggaacagaatcaggccaccttggaagaagcagaacagaaagaggccgaatttcagcagatgattgaacagcttaaaaagcaacaggaggcagctcagcaggcagcaacggcaactgcctcagaacattccagagagcccagtgcagcaggcaggctctcagacagctcatctgaagcctctaagttgagttccaagagtgctaaggaaagaagaaatcggaggaagaaaagaaaacagaaagagcagtctggtggggaagagaaagatgaggatgaattccaaaaatctgaatctgaggacagcatcaggaggaaaggttttcgcttctccattgaagggaaccgattgacatatgaaaagaggtactcctccccacaccagtctttgttgagcatccgtggctccctattttcaccaaggcgaaatagcagaacaagccttttcagctttagagggcgagcaaaggatgtgggatctgagaacgacttcgcagatgatgagcacagcacctttgaggataacgagagccgtagagattccttgtttgtgccccgacgacacggagagagacgcaacagcaacctgagtcagaccagtaggtcatcccggatgctggcagtgtttccagcgaatgggaagatgcacagcactgtggattgcaatggtgtggtttccttggttggtggaccttcagttcctacatcgcctgttggacagcttctgccagaggtgataatagataagccagctactgatgacaatggaacaaccactgaaactgaaatgagaaagagaaggtcaagttctttccacgtttccatggactttctagaagatccttcccaaaggcaacgagcaatgagtatagccagcattctaacaaatacagtagaagaacttgaagaatccaggcagaaatgcccaccctgttggtataaattttccaacatattcttaatctgggactgttctccatattggttaaaagtgaaacatgttgtcaacctggttgtgatggacccatttgttgacctggccatcaccatctgtattgtcttaaatactcttttcatggccatggagcactatccaatgacggaccatttcaataatgtgcttacagtaggaaacttggttttcactgggatctttacagcagaaatgtttctgaaaattattgccatggatccttactattatttccaagaaggctggaatatctttgacggttttattgtgacgcttagcctggtagaacttggactcgccaatgtggaaggattatctgttctccgttcatttcgattgctgcgagttttcaagttggcaaaatcttggccaacgttaaatatgctaataaagatcatcggcaattccgtgggggctctgggaaatttaaccctcgtcttggccatcatcgtcttcatttttgccgtggtcggcatgcagctctttggtaaaagctacaaagattgtgtctgcaagatcgccagtgattgtcaactcccacgctggcacatgaatgacttcttccactccttcctgattgtgttccgcgtgctgtgtggggagtggatagagaccatgtgggactgtatggaggttgctggtcaagccatgtgccttactgtcttcatgatggtcatggtgattggaaacctagtggtcctgaatctctttctggccttgcttctgagctcatttagtgcagacaaccttgcagccactgatgatgataatgaaatgaataatctccaaattgctgtggataggatgcacaaaggagtagcttatgtgaaaagaaaaatatatgaatttattcaacagtccttcattaggaaacaaaagattttagatgaaattaaaccacttgatgatctaaacaacaagaaagacagttgtatgtccaatcatacaacagaaattgggaaagatcttgactatcttaaagatgtaaatggaactacaagtggtataggaactggcagcagtgttgaaaaatacattattgatgaaagtgattacatgtcattcataaacaaccccagtcttactgtgactgtaccaattgctgtaggagaatctgactttgaaaatttaaacacggaagactttagtagtgaatcggatctggaagaaagcaaagagaaactgaatgaaagcagtagctcatcagaaggtagcactgtggacatcggcgcacctgtagaagaacagcccgtagtggaacctgaagaaactcttgaaccagaagcttgtttcactgaaggctgtgtacaaagattcaagtgttgtcaaatcaatgtggaagaaggcagaggaaaacaatggtggaacctgagaaggacgtgtttccgaatagttgaacataactggtttgagaccttcattgttttcatgattctccttagtagtggtgctctggcatttgaagatatatatattgatcagcgaaagacgattaagacgatgttggaatatgctgacaaggttttcacttacattttcattctggaaatgcttctaaaatgggtggcatatggctatcaaacatatttcaccaatgcctggtgttggctggacttcttaattgttgatgtttcattggtcagtttaacagcaaatgccttgggttactcagaacttggagccatcaaatctctcaggacactaagagctctgagacctctaagagccttatctcgatttgaagggatgagggtggttgtgaatgcccttttaggagcaattccatccatcatgaatgtgcttctggtttgtcttatattctggctaattttcagcatcatgggcgtaaatttgtttgctggcaaattctaccactgtattaacaccacaactggtgacaggtttgacatcgaagacgtgaataatcatactgattgcctaaaactaatagaaagaaatgagactgctcgatggaaaaatgtgaaagtaaactttgataatgtaggatttgggtatctctctttgcttcaagttgccacattcaaaggatggatggatataatgtatgcagcagttgattccagaaatgtggaactccagcctaagtatgaaaaaagtctgtacatgtatctttactttgttattttcatcatctttgggtccttcttcaccttgaacctgtttattggtgtcatcatagataatttcaaccagcagaaaaagaagtttggaggtcaagacatctttatgacagaagaacagaagaaatactataatgcaatgaaaaaattaggatcgaaaaaaccgcaaaagcctatacctcgaccaggaaacaaatttcaaggaatggtctttgacttcgtaaccagacaagtttttgacataagcatcatgattctcatctgtcttaacatggtcacaatgatggtggaaacagatgaccagagtgaatatgtgactaccattttgtcacgcatcaatctggtgttcattgtgctatttactggagagtgtgtactgaaactcatctctctacgccattattattttaccattggatggaatatttttgattttgtggttgtcattctctccattgtaggtatgtttcttgccgagctgatagaaaagtatttcgtgtcccctaccctgttccgagtgatccgtcttgctaggattggccgaatcctacgtctgatcaaaggagcaaaggggatccgcacgctgctctttgctttgatgatgtcccttcctgcgttgtttaacatcggcctcctactcttcctagtcatgttcatctacgccatctttgggatgtccaactttgcctatgttaagagggaagttgggatcgatgacatgttcaactttgagacctttggcaacagcatgatctgcctattccaaattacaacctctgctggctgggatggattgctagcacccattctcaacagtaagccacccgactgtgaccctaataaagttaaccctggaagctcagttaagggagactgtgggaacccatctgttggaattttcttttttgtcagttacatcatcatatccttcctggttgtggtgaacatgtacatcgcggtcatcctggagaacttcagtgttgctactgaagaaagtgcagagcctctgagtgaggatgactttgagatgttctatgaggtttgggagaagtttgatcccgatgcaactcagttcatggaatttgaaaaattatctcagtttgcagctgcgcttgaaccgcctctcaatctgccacaaccaaacaaactccagctcattgccatggatttgcccatggtgagtggtgaccggatccactgtcttgatatcttatttgcttttacaaagcgggttctaggagagagtggagagatggatgctctacgaatacagatggaagagcgattcatggcttccaatccttccaaggtctcctatcagccaatcactactactttaaaacgaaaacgaggaagtatctgctgtcattattcagcgtgcttacagacgccaccttttaaagcgaactgtaaaacaagcttcctttacgtacaataaaaacaaaatcaaaggtggggctaatcttcttataaaagaagacatgataattgacagaataaatgaaaactctattacagaaaaaactgatctgaccatgtccactgcagcttgtccaccttcctatgaccgggtgacaaagccaattgtggaaaaacatgagcaagaaggcaaagatgaaaaagccaaagggaaataaatgaaaataaataaaaataattgggtgacaaattgtttacagcctgtgaaggtgatgtatttttatcaacaggactcctttaggaggtcaatgccaaactgactgtttttacacaaatctccttaaggtcagtgcctacaataagacagtgaccccttgtcagcaaactgtgactctgtgtaaaggggagatgaccttgacaggaggttactgttctcactaccagctgacactgctgaagataagatgcacaatggctagtcagactgtagggaccagtttcaaggggtgcaaacctgtgattttggggttgtttaacatgaaacactttagtgtagtaattgtatccactgtttgcatttcaactgccacatttgtcacatttttatggaatctgttagtggattcatctttttgttaatccatgtgtttattatatgtgactatttttgtaaacgaagtttctgttgagaaataggctaaggacctctataacaggtatgccacctggggggtatggcaaccacatggccctcccagctacacaaagtcgtggtttgcatgagggcatgctgcacttagagatcatgcatgagaaaaagtcacaagaaaaacaaattcttaaatttcaccatatttctgggaggggtaattgggtgataagtggaggtgctttgttgatcttgttttgcgaaatccagcccctagaccaagtagattatttgtgggtaggccagtaaatcttagcaggtgcaaacttcattcaaatgtttggagtcataaatgttatgtttctttttgttgtattaaaaaaaaaacctgaatagtgaatattgcccctcaccctccaccgccagaagactgaattgaccaaaattactctttataaatttctgctttttcctgcactttgtttagccatctttgggctctcagcaaggttgacactgtatatgttaatgaaatgctatttattatgtaaatagtcattttaccctgtggtgcacgtttgagcaaacaaataatgacctaagcacagtatttattgcatcaaatatgtaccacaagaaatgtagagtgcaagctttacacaggtaataaaatgtattctgtaccatttatagatagtttggatgctatcaatgcatgtttatattaccatgctgctgtatctggtttctctcactgctcagaatctcatttatgagaaaccatatgtcagtggtaaagtcaaggaaattgttcaacagatctcatttatttaagtcattaagcaatagtttgcagcactttaacagctttttggttatttttacattttaagtggataacatatggtatatagccagactgtacagacatgtttaaaaaaacacactgcttaacctattaaatatgtgtttagaattttataagcaaatataaatactgtaaaaagtcactttattttatttttcagcattatgtacataaatatgaagaggaaattatcttcaggttgatatcacaatcacttttcttactttctgtccatagtactttttcatgaaagaaatttgctaaataagacatgaaaacaagactgggtagttgtagatttctgctttttaaattacatttgctaattttagattatttcacaattttaaggagcaaaataggttcacgattcatatccaaattatgctttgcaattggaaaagggtttaaaattttatttatatttctggtagtacctgtactaactgaattgaaggtagtgcttatgttatttttgttctttttttctgacttcggtttatgttttcatttctttggagtaatgctgctctagattgttctaaatagaatgtgggcttcataatttttttttccacaaaaacagagtagtcaacttatatagtcaattacatcaggacattttgtgtttcttacagaagcaaaccataggctcctcttttccttaaaactacttagataaactgtattcgtgaactgcatgctggaaaatgctactattatgctaaataatgctaaccaacatttaaaatgtgcaaaactaataaagattacattttttatttt

SEQ ID NO: 54 - protein, 2009 aa, Homo sapiens
MEQTVLVPPGPDSFNFFTRESLAAIERRIAEEKAKNPKPDKKDDDENGPKPNSDLEAGKNLPFIYGDIPPEMVSEPLEDLDPYYINKKTFIVLNKLKAIFRFSATSALYILTPFNPLRKIAIKILVHSLFSMLIMCTILTNCVFMTMSNPPDWTKNVEYTFTGIYTFESLIKIIARGFCLEDFTFLRDPWNWLNFTVITFAYVTEFVDLGNVSALRTFRVLRALKTISVIPGLKTIVGALIQSVKKLSDVMILTVFCLSVFALIGLQLFMGNLRNKCIQWPPTNASLEEHSIEKNITVNYNGTLINETVFEFDWKSYIQDSRYHYFLEGFLDALLCGNSSDAGQCPEGYMCVKAGRNPNYGYTSFDTFSWAFLSLFRLMTQDFWENLYQLTLRAAGKTYMIFFVLVIFLGSFYLINLILAVVAMAYEEQNQATLEEAEQKEAEFQQMIEQLKKQQEAAQQAATATASEHSREPSAAGRLSDSSSEASKLSSKSAKERRNRRKKRKQKEQSGGEEKDEDEFQKSESEDSIRRKGFRFSIEGNRLTYEKRYSSPHQSLLSIRGSLFSPRRNSRTSLFSFRGRAKDVGSENDFADDEHSTFEDNESRRDSLFVPRRHGERRNSNLSQTSRSSRMLAVFPANGKMHSTVDCNGVVSLVGGPSVPTSPVGQLLPEVIIDKPATDDNGTTTETEMRKRRSSSFHVSMDFLEDPSQRQRAMSIASILTNTVEELEESRQKCPPCWYKFSNIFLIWDCSPYWLKVKHVVNLVVMDPFVDLAITICIVLNTLFMAMEHYPMTDHFNNVLTVGNLVFTGIFTAEMFLKIIAMDPYYYFQEGWNIFDGFIVTLSLVELGLANVEGLSVLRSFRLLRVFKLAKSWPTLNMLIKIIGNSVGALGNLTLVLAIIVFIFAVVGMQLFGKSYKDCVCKIASDCQLPRWHMNDFFHSFLIVFRVLCGEWIETMWDCMEVAGQAMCLTVFMMVMVIGNLVVLNLFLALLLSSFSADNLAATDDDNEMNNLQIAVDRMHKGVAYVKRKIYEFIQQSFIRKQKILDEIKPLDDLNNKKDSCMSNHTTEIGKDLDYLKDVNGTTSGIGTGSSVEKYIIDESDYMSFINNPSLTVTVPIAVGESDFENLNTEDFSSESDLEESKEKLNESSSSSEGSTVDIGAPVEEQPVVEPEETLEPEACFTEGCVQRFKCCQINVEEGRGKQWWNLRRTCFRIVEHNWFETFIVFMILLSSGALAFEDIYIDQRKTIKTMLEYADKVFTYIFILEMLLKWVAYGYQTYFTNAWCWLDFLIVDVSLVSLTANALGYSELGAIKSLRTLRALRPLRALSRFEGMRVVVNALLGAIPSIMNVLLVCLIFWLIFSIMGVNLFAGKFYHCINTTTGDRFDIEDVNNHTDCLKLIERNETARWKNVKVNFDNVGFGYLSLLQVATFKGWMDIMYAAVDSRNVELQPKYEKSLYMYLYFVIFIIFGSFFTLNLFIGVIIDNFNQQKKKFGGQDIFMTEEQKKYYNAMKKLGSKKPQKPIPRPGNKFQGMVFDFVTRQVFDISIMILICLNMVTMMVETDDQSEYVTTILSRINLVFIVLFTGECVLKLISLRHYYFTIGWNIFDFVVVILSIVGMFLAELIEKYFVSPTLFRVIRLARIGRILRLIKGAKGIRTLLFALMMSLPALFNIGLLLFLVMFIYAIFGMSNFAYVKREVGIDDMFNFETFGNSMICLFQITTSAGWDGLLAPILNSKPPDCDPNKVNPGSSVKGDCGNPSVGIFFFVSYIIISFLVVVNMYIAVILENFSVATEESAEPLSEDDFEMFYEVWEKFDPDATQFMEFEKLSQFAAALEPPLNLPQPNKLQLIAMDLPMVSGDRIHCLDILFAFTKRVLGESGEMDALRIQMEERFMASNPSKVSYQPITTTLKRKQEEVSAVIIQRAYRRHLLKRTVKQASFTYNKNKIKGGANLLIKEDMIIDRINENSITEKTDLTMSTAACPPSYDRVTKPIVEKHEQEGKDEKAKGK

SEQ ID NO: 55 - protein, 2009 aa, Homo sapiens
MEQTVLVPPGPDSFNFFTRESLAAIERRIAEEKAKNPKPDKKDDDENGPKPNSDLEAGKNLPFIYGDIPPEMVSEPLEDLDPYYINKKTFIVLNKLKAIFRFSATSALYILTPFNPLRKIAIKILVHSLFSMLIMCTILTNCVFMTMSNPPDWTKNVEYTFTGIYTFESLIKIIARGFCLEDFTFLRDPWNWLDFTVITFAYVTEFVDLGNVSALRTFRVLRALKTISVIPGLKTIVGALIQSVKKLSDVMILTVFCLSVFALIGLQLFMGNLRNKCIQWPPTNASLEEHSIEKNITVNYNGTLINETVFEFDWKSYIQDSRYHYFLEGFLDALLCGNSSDAGQCPEGYMCVKAGRNPNYGYTSFDTFSWAFLSLFRLMTQDFWENLYQLTLRAAGKTYMIFFVLVIFLGSFYLINLILAVVAMAYEEQNQATLEEAEQKEAEFQQMIEQLKKQQEAAQQAATATASEHSREPSAAGRLSDSSSEASKLSSKSAKERRNRRKKRKQKEQSGGEEKDEDEFQKSESEDSIRRKGFRFSIEGNRLTYEKRYSSPHQSLLSIRGSLFSPRRNSRTSLFSFRGRAKDVGSENDFADDEHSTFEDNESRRDSLFVPRRHGERRNSNLSQTSRSSRMLAVFPANGKMHSTVDCNGVVSLVGGPSVPTSPVGQLLPEVIIDKPATDDNGTTTETEMRKRRSSSFHVSMDFLEDPSQRQRAMSIASILTNTVEELEESRQKCPPCWYKFSNIFLIWDCSPYWLKVKHVVNLVVMDPFVDLAITICIVLNTLFMAMEHYPMTDHFNNVLTVGNLVFTGIFTAEMFLKIIAMDPYYYFQEGWNIFDGFIVTLSLVELGLANVEGLSVLRSFRLLRVFKLAKSWPTLNMLIKIIGNSVGALGNLTLVLAIIVFIFAVVGMQLFGKSYKDCVCKIASDCQLPRWHMNDFFHSFLIVFRVLCGEWIETMWDCMEVAGQAMCLTVFMMVMVIGNLVVLNLFLALLLSSFSADNLAATDDDNEMNNLQIAVDRMHKGVAYVKRKIYEFIQQSFIRKQKILDEIKPLDDLNNKKDSCMSNHTTEIGKDLDYLKDVNGTTSGIGTGSSVEKYIIDESDYMSFINNPSLTVTVPIAVGESDFENLNTEDFSSESDLEESKEKLNESSSSSEGSTVDIGAPVEEQPVVEPEETLEPEACFTEGCVQRFKCCQINVEEGRGKQWWNLRRTCFRIVEHNWFETFIVFMILLSSGALAFEDIYIDQRKTIKTMLEYADKVFTYIFILEMLLKWVAYGYQTYFTNAWCWLDFLIVDVSLVSLTANALGYSELGAIKSLRTLRALRPLRALSRFEGMRVVVNALLGAIPSIMNVLLVCLIFWLIFSIMGVNLFAGKFYHCINTTTGDRFDIEDVNNHTDCLKLIERNETARWKNVKVNFDNVGFGYLSLLQVATFKGWMDIMYAAVDSRNVELQPKYEKSLYMYLYFVIFIIFGSFFTLNLFIVVIIDNFNQQKKKFGGQDIFMTEEQKKYYNAMKKLGSKKPQKPIPRPGNKFQGMVFDFVTRQVFDISIMILICLNMVTMMVETDDQSEYVTTILSRINLVFIVLFTGECVLKLISLRHYYFTIGWNIFDFVVVILSIVGMFLAELIEKYFVSPTLFRVIRLARIGRILRLIKGAKGIRTLLFALMMSLPALFNIGLLLFLVMFIYAIFGMSNFAYVKREVGIDDMFNFETFGNSMICLFQITTSAGWDGLLAPILNSKPPDCDPNKVNPGSSVKGDCGNPSVGIFFFVSYIIISFLVVVNMYIAVILENFSVATEESAEPLSEDDFEMFYEVWEKFDPDATQFMEFEKLSQFAAALEPPLNLPQPNKLQLIAMDLPMVSGDRIHCLDILFAFTKRVLGESGEMDALRIQMEERFMASNPSKVSYQPITTTLKRKQEEVSAVIIQRAYRRHLLKRTVKQASFTYNKNKIKGGANLLIKEDMIIDRINENSITEKTDLTMSTAACPPSYDRVTKPIVEKHEQEGKDEKAKGK

SEQ ID NO: 56 - protein, 2009 aa, Homo sapiens
MEQTVLVPPGPDSFNFFTRESLAAIERRIAEEKAKNPKPDKKDDDENGPKPNSDLEAGKNLPFIYGDIPPEMVSEPLEDLDPYYINKKTFIVLNKLKAIFRFSATSALYILTPFNPLRKIAIKILVHSLFSMLIMCTILTNCVFMTMSNPPDWTKNVEYTFTGIYTFESLIKIIARGFCLEDFTFLRDPWNWLDFTVITFAYVTEFVDLGNVSALRTFRVLRALKTISVIPGLKTIVGALIQSVKKLSDVMILTVFCLSVFALIGLQLFMGNLRNKCIQWPPTNASLEEHSIEKNITVNYNGTLINETVFEFDWKSYIQDSRYHYFLEGFLDALLCGNSSDAGQCPEGYMCVKAGRNPNYGYTSFDTFSWAFLSLFRLMTQDFWENLYQLTLRAAGKTYMIFFVLVIFLGSFYLINLILAVVAMAYEEQNQATLEEAEQKEAEFQQMIEQLKKQQEAAQQAATATASEHSREPSAAGRLSDSSSEASKLSSKSAKERRNRRKKRKQKEQSGGEEKDEDEFQKSESEDSIRRKGFRFSIEGNRLTYEKRYSSPHQSLLSIRGSLFSPRRNSRTSLFSFRGRAKDVGSENDFADDEHSTFEDNESRRDSLFVPRRHGERRNSNLSQTSRSSRMLAVFPANGKMHSTVDCNGVVSLVGGPSVPTSPVGQLLPEVIIDKPATDDNGTTTETEMRKRRSSSFHVSMDFLEDPSQRQRAMSIASILTNTVEELEESRQKCPPCWYKFSNIFLIWDCSPYWLKVKHVVNLVVMDPFVDLAITICIVLNTLFMAMEHYPMTDHFNNVLTVGNLVFTGIFTAEMFLKIIAMDPYYYFQEGWNIFDGFIVTLSLVELGLANVEGLSVLRSFRLLRVFKLAKSWPTLNMLIKIIGNSVGALGNLTLVLAIIVFIFAVVGMQLFGKSYKDCVCKIASDCQLPRWHMNDFFHSFLIVFRVLCGEWIETMWDCMEVAGQAMCLTVFMMVMVIGNLVVLNLFLALLLSSFSADNLAATDDDNEMNNLQIAVDRMHKGVAYVKRKIYEFIQQSFIRKQKILDEIKPLDDLNNKKDSCMSNHTTEIGKDLDYLKDVNGTTSGIGTGSSVEKYIIDESDYMSFINNPSLTVTVPIAVGESDFENLNTEDFSSESDLEESKEKLNESSSSSEGSTVDIGAPVEEQPVVEPEETLEPEACFTEGCVQRFKCCQINVEEGRGKQWWNLRRTCFRIVEHNWFETFIVFMILLSSGALAFEDIYIDQRKTIKTMLEYADKVFTYIFILEMLLKWVAYGYQTYFTNAWCWLDFLIVDVSLVSLTANALGYSELGAIKSLRTLRALRPLRALSRFEGMRVVVNALLGAIPSIMNVLLVCLIFWLIFSIMGVNLFAGKFYHCINTTTGDRFDIEDVNNHTDCLKLIERNETARWKNVKVNFDNVGFGYLSLLQVATFKGWMDIMYAAVDSRNVELQPKYEKSLYMYLYFVIFIIFGSFFTLNLFIGVIIDNFNQQKKKFGGQDIFMTEEQKKYYNAMKKLGSKKPQKPIPRPGNKFQGMVFDFVTRQVFDISIMILICLNMVTMMVETDDQSEYVTTILSRINLVFIVLFTGECVLKLISLRHYYFTIGWNIFDFVVVILSIVGMFLAELIEKYFVSPTLFQVIRLARIGRILRLIKGAKGIRTLLFALMMSLPALFNIGLLLFLVMFIYAIFGMSNFAYVKREVGIDDMFNFETFGNSMICLFQITTSAGWDGLLAPILNSKPPDCDPNKVNPGSSVKGDCGNPSVGIFFFVSYIIISFLVVVNMYIAVILENFSVATEESAEPLSEDDFEMFYEVWEKFDPDATQFMEFEKLSQFAAALEPPLNLPQPNKLQLIAMDLPMVSGDRIHCLDILFAFTKRVLGESGEMDALRIQMEERFMASNPSKVSYQPITTTLKRKQEEVSAVIIQRAYRRHLLKRTVKQASFTYNKNKIKGGANLLIKEDMIIDRINENSITEKTDLTMSTAACPPSYDRVTKPIVEKHEQEGKDEKAKGK

SEQ ID NO: 57 - protein, 621 aa, Homo sapiens
MEQTVLVPPGPDSFNFFTRESLAAIERRIAEEKAKNPKPDKKDDDENGPKPNSDLEAGKNLPFIYGDIPPEMVSEPLEDLDPYYINKKTFIVLNKLKAIFRFSATSALYILTPFNPLRKIAIKILVHSLFSMLIMCTILTNCVFMTMSNPPDWTKNVEYTFTGIYTFESLIKIIARGFCLEDFTFLRDPWNWLDFTVITFAYVTEFVDLGNVSALRTFRVLRALKTISVIPGLKTIVGALIQSVKKLSDVMILTVFCLSVFALIGLQLFMGNLRNKCIQWPPTNASLEEHSIEKNITVNYNGTLINETVFEFDWKSYIQDSRYHYFLEGFLDALLCGNSSDAGQCPEGYMCVKAGRNPNYGYTSFDTFSWAFLSLFRLMTQDFWENLYQLTLRAAGKTYMIFFVLVIFLGSFYLINLILAVVAMAYEEQNQATLEEAEQKEAEFQQMIEQLKKQQEAAQQAATATASEHSREPSAAGRLSDSSSEASKLSSKSAKERRNRRKKRKQKEQSGGEEKDEDEFQKSESEDSIRRKGFRFSIEGNRLTYEKRYSSPHQSLLSIRGSLFSPRRNSRTSLSALEGEQRMWDLRTTSQMMSTAPLRITRAVEIPCLCPDDTERDATAT

SEQ ID NO: 58 - protein, 1942 aa, Homo sapiens
MEQTVLVPPGPDSFNFFTRESLAAIERRIAEEKAKNPKPDKKDDDENGPKPNSDLEAGKNLPFIYGDIPPEMVSEPLEDLDPYYINKKTFIVLNKLKAIFRFSATSALYILTPFNPLRKIAIKILVHSLFSMLIMCTILTNCVFMTMSNPPDWTKNVEYTFTGIYTFESLIKIIARGFCLEDFTFLRDPWNWLDFTVITFAYVTEFVDLGNVSALRTFRVLRALKTISVIPGLKTIVGALIQSVKKLSDVMILTVFCLSVFALIGLQLFMGNLRNKCIQWPPTNASLEEHSIEKNITVNYNGTLINETVFEFDWKSYIQDSRYHYFLEGFLDALLCGNSSDAGQCPEGYMCVKAGRNPNYGYTSFDTFSWAFLSLFRLMTQDFWENLYQLTLRAAGKTYMIFFVLVIFLGSFYLINLILAVVAMAYEEQNQATLEEAEQKEAEFQQMIEQLKKQQEAAQQAATATASEHSREPSAAGRLSDSSSEASKLSSKSAKERRNRRKKRKQKEQSGGEEKDEDEFQKSESEDSIRRKGFRFSIEGNRLTYEKRYSSPHQSLLSIRGSLFSPRRNSRTSLFSFRGRAKDVGSENDFADDEHSTFEDNESRRDSLFVPRRHGERRNSNLSQTSRSSRMLAVFPANGKMHSTVDCNGVVSLVGGPSVPTSPVGQLLPEVIIDKPATDDNGTTTETEMRKRRSSSFHVSMDFLEDPSQRQRAMSIASILTNTVEELEESRQKCPPCWYKFSNIFLIWDCSPYWLKVKHVVNLVVMDPFVDLAITICIVLNTLFMAMEHYPMTDHFNNVLTVGNLVFTGIFTAEMFLKIIAMDPYYYFQEGWNIFDGFIVTLSLVELGLANVEGLSVLRSFRLLRVFKLAKSWPTLNMLIKIIGNSVGALGNLTLVLAIIVFIFAVVGMQLFGKSYKDCVCKIASDCQLPRWHMNDFFHSFLIVFRVLCGEWIETMWDCMEVAGQAMCLTVFMMVMVIGNLVVLNLFLALLLSSFSADNLAATDDDNEMNNLQIAVDRMHKGVAYVKRKIYEFIQQSFIRKQKILDEIKPLDDLNNKKDSCMSNHTTEIGKDLDYLKDVNGTTSGIGTGSSVEKYIIDESDYMSFINNPSLTVTVPIAVGESDFENLNTEDFSSESDLEESKEKLNESSSSSEGSTVDIGAPVEEQPVVEPEETLEPEACFTEGCVQRFKCCQINVEEGRGKQWWNLRRTCFRIVEHNWFETFIVFMILLSSGALAFEDIYIDQRKTIKTMLEYADKVFTYIFILEMLLKWVAYGYQTYFTNAWCWLDFLIVDVSLVSLTANALGYSELGAIKSLRTLRALRPLRALSRFEGMRVVVNALLGAIPSIMNVLLVCLIFWLIFSIMGVNLFAGKFYHCINTTTGDRFDIEDVNNHTDCLKLIERNETARWKNVKVNFDNVGFGYLSLLQVATFKGWMDIMYAAVDSRNVELQPKYEKSLYMYLYFVIFIIFGSFFTLNLFIGVIIDNFNQQKKKFGGQDIFMTEEQKKYYNAMKKLGSKKPQKPIPRPGNKFQGMVFDFVTRQVFDISIMILICLNMVTMMVETDDQSEYVTTILSRINLVFIVLFTGECVLKLISLRHYYFTIGWNIFDFVVVILSIVGMFLAELIEKYFVSPTLFRVIRLARIGRILRLIKGAKGIRTLLFALMMSLPALFNIGLLLFLVMFIYAIFGMSNFAYVKREVGIDDMFNFETFGNSMICLFQITTSAGWDGLLAPILNSKPPDCDPNKVNPGSSVKGDCGNPSVGIFFFVSYIIISFLVVVNMYIAVILENFSVATEESAEPLSEDDFEMFYEVWEKFDPDATQFMEFEKLSQFAAALEPPLNLPQPNKLQLIAMDLPMVSGDRIHCLDILFAFTKRVLGESGEMDALRIQMEERFMASNPSKVSYQPITTTLKRKRGSICCHYSACLQTPPFKANCKTSFLYVQ
